(19) United States
(12) Patent Application Publication
(10) Pub. No.: US 2023/0072822 A1
(43) Pub. Date: Mar. 9, 2023

(54) TUMOR-SPECIFIC CLEAVABLE LINKERS

(71) Applicant: Xilio Development, Inc., Waltham, MA (US)

(72) Inventors: Raphael ROZENFELD, Swampscott, MA (US); Ugur ESKIOCAK, Somerville, MA (US); Huawei QIU, Westborough, MA (US); Parker JOHNSON, Allston, MA (US); Kurt Allen JENKINS, Weymouth, MA (US); Magali PEDERZOLI-RIBEIL, Cambridge, MA (US); Dheeraj Singh TOMAR, Dorchester, MA (US); Rebekah Kay O'DONNELL, Brookline, MA (US)

(21) Appl. No.: 17/535,451

(22) Filed: Nov. 24, 2021

Related U.S. Application Data
(60) Provisional application No. 63/253,090, filed on Oct. 6, 2021.
(60) Provisional application No. 63/118,585, filed on Nov. 25, 2020.

(51) Int. Cl. A61K 47/65; A61K 38/20; A61K 47/64; A61P 35/00

(52) U.S. Cl. CPC A61K 47/65; A61K 38/2013; A61K 38/208; A61K 38/2086; A61K 47/64; A61P 35/00

(57) ABSTRACT

The present disclosure provides tumor-specific cleavable linkers and their use in drugs and prodrugs for delivering therapeutics to a tumor cell environment. The present disclosure also provides cleavage products of said drugs and prodrugs, and methods related to the use of the same.

### CROSS-REFERENCE TO RELATED APPLICATIONS

[0001] This application claims the priority benefit of U.S. Provisional Application Ser. No. 63/118,585, filed Nov. 25, 2020; and 63/253,090, filed Oct. 6, 2021; each of which is incorporated herein by reference in its entirety.

### SUBMISSION OF SEQUENCE LISTING ON ASCII TEXT FILE

[0002] The content of the following submission on ASCII text file is incorporated herein by reference in its entirety: a computer readable form (CRF) of the Sequence Listing (file name: 737762003000SEQLIST.TXT, date recorded: Nov. 23, 2021, size: 961 KB).

### FIELD

[0003] This invention relates to tumor-specific cleavable linkers and their use in drugs and prodrugs for delivering therapeutics to a tumor cell environment. This invention also relates to cleavage products of said drugs and prodrugs, and methods related to the use of the same.

### BACKGROUND

[0004] Cancer is the second leading cause of death in the United States, accounting for more deaths than the next five leading causes (chronic respiratory disease, stroke, accidents. Alzheimer's disease and diabetes). While great strides have been made especially with targeted therapies, there remains a great deal of work to do in this space. Immunotherapy and a branch of this field, immuno-oncology, is creating viable and exciting therapeutic options for treating malignancies. Specifically, it is now recognized that one hallmark of cancer is immune evasion and significant efforts have identified targets and developed therapies to these targets to reactivate the immune system to recognize and treat cancer.

[0005] Cytokine therapy is an effective strategy for stimulating the immune system to induce anti-tumor cytotoxicity. In particular, aldesleukin, a recombinant form of interleukin-2 (IL-2), has been approved by the FDA for the treatment of metastatic renal cell carcinoma and melanoma. Unfortunately, cytokines that are administered to patients generally have a very short half-life, thereby requiring frequent dosing. For instance, the product label of aldesleukin, marketed under the brand name Proleukin, states that the drug was shown to have a half-life of 85 minutes in patients who received a 5-minute intravenous (IV) infusion. In addition, administration of high doses of cytokine can cause adverse health outcomes, such as vascular leakage, through systemic immune activation. These findings illustrate the need for developing therapeutics, such as cytokine therapeutics, that effectively target tumors without the side effects associated with systemic immune activation.

[0006] Prodrugs in which a cytokine therapeutic is masked by a masking moiety and in which the therapeutic is only active after cleavage of the masking moiety in the tumor cell environment are one way envisaged for addressing this need.

### SUMMARY

[0007] This invention provides novel tumor-specific proteolytically cleavable peptide linkers comprising tumor-specific proteolytically cleavable peptides and their use in polypeptide drug constructs for delivering a therapeutic moiety to a tumor cell environment. The part of the construct other than the therapeutic moiety can be considered as a carrier moiety.

[0008] The tumor-specific proteolytically cleavable peptide acts as a substrate for protease(s) present in the tumor cell environment. The proteolytically cleavable peptide linker is positioned within the polypeptide drug construct so that the linker cleaves by protease action in the tumor cell environment, and the polypeptide drug construct separates to form cleavage products, one of which will comprise the therapeutic moiety. This invention also relates to cleavage products of said drug constructs, and methods related to the use of the same.

[0009] Provided herein is a polypeptide drug construct comprising (i) a therapeutic moiety; (ii) a carrier moiety and (iii) a proteolytically cleavable peptide linker comprising a tumor-specific proteolytically cleavable peptide having an amino acid sequence DLLAVVAAS or ISSGLLSGRS.

[0010] In some embodiments, the proteolytically cleavable peptide (CP) is flanked on both sides by a spacer domain (SD1 and SD2) as shown in formula:

SD1-CP-SD2.

[0011] In some embodiments, the spacer domains are rich in amino acid residues G, S and P.

[0012] In some embodiments, the proteolytically cleavable peptide linker is from 10 to 25 amino acids in length.

[0013] In some embodiments, the spacer domains only include amino acid residue types selected from the group consisting of G, S and P.

[0014] In some embodiments, the first spacer domain (SD1) is between 3 and 6 amino acids in length.

[0015] In some embodiments, the second spacer domain (SD2) is between 3 and 6 amino acids in length.

[0016] In some embodiments, SD2 comprises the amino acid sequence SGP.

[0017] In some embodiments, SD2 has the amino acid sequence SGP.

[0018] In some embodiments, the proteolytically cleavable peptide linker comprises sequence

GGPSDLLAVVAASSGP.

[0019] In some embodiments, the proteolytically cleavable peptide linker comprises sequence

GSGPSDLLAVVAASSGP.

[0020] In some embodiments, the proteolytically cleavable peptide linker comprises sequence

GSSGGPDLLAVVAASSGP.

[0021] In some embodiments, the proteolytically cleavable peptide linker comprises sequence

GSPDLLAVVAASSGP.

[0022] In some embodiments, the proteolytically cleavable peptide linker comprises sequence

GSPGDLLAVVAASSGP.

[0023] In some embodiments, the proteolytically cleavable peptide linker comprises sequence

GSGSPSDLLAVVAASSGP.

[0024] In some embodiments, the proteolytically cleavable linker comprises sequence

GGSSGGSPISSGLLSGRSSGPGSGS.

[0025] In some embodiments, the proteolytically cleavable linker comprises sequence

GPPSGSSPISSGLLSGRSSGGG.

[0026] In some embodiments, the proteolytically cleavable linker comprises sequence

GGSGGSISSGLLSGRSSGP.

[0027] In some embodiments, the proteolytically cleavable linker comprises sequence

GGSGGSGGSISSGLLSGRSSGP.

[0028] In some embodiments, the proteolytically proteolytically cleavable peptide linker is covalently bonded directly to the therapeutic moiety.

[0029] In some embodiments, the proteolytically cleavable peptide linker is located within the drug construct between the therapeutic moiety and the carrier moiety.

[0030] In some embodiments, the proteolytically cleavable peptide linker is located within the carrier moiety.

[0031] In some embodiments, the polypeptide drug construct comprises a single polypeptide chain. This means that the therapeutic moiety, the carrier moiety and the proteolytically cleavable peptide linker are present in the same polypeptide chain.

[0032] In some embodiments, the polypeptide drug construct comprises more than one polypeptide chain. In some embodiments, the proteolytically cleavable peptide linker is present in the same polypeptide chain as the therapeutic moiety. In some embodiments, the proteolytically cleavable peptide linker is present in a different polypeptide chain to the therapeutic moiety.

[0033] In some embodiments, the polypeptide drug construct is a prodrug. In some embodiments, where the polypeptide drug construct is a prodrug, the remainder of the molecule (away from which the therapeutic moiety separates after cleavage of the proteolytically cleavable peptide linker) comprises a masking moiety, which inhibits the biological activity of the therapeutic moiety in the prodrug such that the therapeutic moiety is biologically active only after cleavage of the proteolytically cleavable peptide linker in the tumor cell environment. In some embodiments, the masking moiety is present in the same polypeptide chain as the therapeutic moiety. In some embodiments, the masking moiety is present in a different polypeptide chain to the therapeutic moiety.

[0034] In some embodiments, the masking moiety is present in the same polypeptide chain as the therapeutic moiety.

[0035] In some embodiments, the masking moiety is present in a first polypeptide chain and the therapeutic moiety is present in a second polypeptide chain.

[0036] In some embodiments, the drug construct comprises a half-life extension moiety.

[0037] In some embodiments, the half-life extension moiety comprises an antibody or fragment thereof.

[0038] In some embodiments, the half-life extension moiety comprises first and second half-life extension moieties.

[0039] In some embodiments, the prodrug is a cytokine prodrug where the therapeutic moiety is a cytokine moiety.

[0040] In some embodiments, the masking moiety comprises a domain of the extracellular domain of the cytokine receptor.

[0041] A cytokine prodrug as described herein, where the therapeutic moiety is a cytokine moiety and the masking moiety comprises a domain of the extracellular domain of the cytokine receptor is referred to herein as a “masked cytokine”.

[0042] Provided herein, in some embodiments, is a masked cytokine comprising a masking moiety in a first polypeptide chain and a cytokine moiety thereof in a second polypeptide chain. Such masked cytokines may be referred to as ‘heterodimeric’ masked cytokines.

[0043] In some embodiments, the masked cytokine comprises a protein heterodimer comprising:
[0044] a) a first polypeptide chain comprising a masking moiety linked to a first half-life extension moiety via a first linker; and
[0045] b) a second polypeptide chain comprising a cytokine moiety thereof linked to a second half-life extension moiety via a second linker,
   wherein the first half-life extension moiety is associated with the second half-life extension moiety, and wherein at least the first linker or the second linker is a proteolytically cleavable peptide linker comprising a proteolytically cleavable peptide (CP) consisting of the amino acid sequence DLLAVVAAS or ISSGLLSGRS.

[0046] In some embodiments, in the first polypeptide chain, the first half life extension domain is linked to the amino terminus of the first linker and the carboxy terminus of the first linker is linked to the amino terminus of the masking moiety and, in the second polypeptide chain, the second half life extension domain is linked to the amino terminus of the second linker and the carboxy terminus of the second linker is linked to the amino terminus of the cytokine moiety thereof.

[0047] In some embodiments, the first polypeptide chain comprises:

N′HL1-L1-MM C′

and the second polypeptide chain comprises:

N′HL2-L2-C C′

where HL1 is the first half life extension domain, L1 is the first linker, MM is the masking moiety, HL2 is the second half life extension domain, L2 is the second linker, and C is the cytokine moiety,
wherein the first half-life extension moiety is associated with the second half-life extension moiety, and
wherein at least the first linker or the second linker is a proteolytically cleavable peptide linker comprising a proteolytically cleavable peptide (CP) consisting of the amino acid sequence DLLAVVAAS or ISSGLLSGRS.

[0048] In some embodiments, the second linker is the proteolytically cleavable linker and the first linker is a non-cleavable linker. This arrangement is described herein as ‘Structure A’.

[0049] In some embodiments, the first polypeptide chain comprises:

N′HL1-non-cleavable L1-MM C′

and the second polypeptide chain comprises:

N′H1L2-cleavable L2-C C′

[0050] In some embodiments, the first linker is the proteolytically cleavable linker and the second is a non-cleavable linker. This arrangement is described herein as ‘Structure B’.

[0051] In some embodiments, the first polypeptide chain comprises:

N′HL1-cleavable L1-MM C′

and the second polypeptide chain comprises:

N′HL2-non-cleavable L2-C C′

[0052] Provided herein, in some embodiments, is a masked cytokine comprising a masking moiety and a cytokine moiety thereof linked in a single polypeptide chain. In some embodiments, the masked cytokine comprises a polypeptide chain comprising formula:

N′HL-L2-C-L1-MM C′

where HL is the half-life extension domain, L1 is the first linker, MM is the masking moiety, L2 is the second linker, and C is the cytokine moiety, wherein at least the first linker comprises a proteolytically cleavable peptide linker comprising a proteolytically cleavable peptide (CP) consisting of the amino acid sequence DLLAVVAAS or ISSGLLSGRS. The proteolytically cleavable peptide linker may be as described anywhere herein. In some embodiments, the first linker is a proteolytically cleavable peptide linker comprising a proteolytically cleavable peptide (CP) consisting of the amino acid sequence DLLAVVAAS. In some embodiments, the first linker is a proteolytically cleavable peptide linker comprising a proteolytically cleavable peptide (CP) consisting of the amino acid sequence ISSGLLSGRS. In some embodiments, the first linker is a proteolytically cleavable peptide linker and the second linker is non-cleavable. The non-cleavable linker may be as described anywhere herein.

[0053] In some embodiments, the masked cytokine comprises a polypeptide chain comprising formula:

N′HL-L2-MM-L1-C C′

where HL is the half-life extension domain, L1 is the first linker, MM is the masking moiety. L2 is the second linker, and C is the cytokine moiety thereof, wherein at least the first linker comprises a proteolytically cleavable peptide linker comprising a proteolytically cleavable peptide (CP) consisting of the amino acid sequence DLLAVVAAS or ISSGLLSGRS. The proteolytically cleavable peptide linker may be as described anywhere herein. In some embodiments, the first linker is a proteolytically cleavable peptide linker comprising a proteolytically cleavable peptide (CP) consisting of the amino acid sequence DLLAVVAAS. In some embodiments, the first linker is a proteolytically cleavable peptide linker comprising a proteolytically cleavable peptide (CP) consisting of the amino acid sequence ISSGLLSGRS. In some embodiments, the first linker is a proteolytically cleavable peptide linker and the second linker is non-cleavable. The non-cleavable linker may be as described anywhere herein.

[0054] In some embodiments, the non-cleavable linker is between 3 and 25 amino acids in length.

[0055] In some embodiments, wherein the non-cleavable linker is rich in amino acid residues G, S and P.

[0056] In some embodiments, the non-cleavable linker comprises an amino acid sequence of SEQ ID NO: 14.

[0057] In some embodiments, the non-cleavable linker comprises an amino acid sequence of SEQ ID NO: 23.

[0058] In some embodiments, the half-life extension domain comprises a first half life extension domain and a second half life extension domain.

[0059] In some embodiments, the first half-life extension domain comprises a first Fc domain or a fragment thereof and the second Fc domain comprises an Fc domain or a fragment thereof.

[0060] In some embodiments, the first Fc domain comprises a CH3 domain or a fragment thereof and the second Fc domain comprises a CH3 domain or a fragment thereof.

[0061] In some embodiments, the first and second half-life extension domains are each an IgG1 Fc domain or fragment thereof.

[0062] In some embodiments, the first and/or second Fc domains each contain one or more modifications that promote the non-covalent association of the first and the second half-life extension domains.

[0063] In some embodiments, the first half-life extension domain comprises an IgG1 Fc domain or fragment thereof including the mutations Y349C; T366S; L38A; and Y407V to form a ‘hole’ in the first half-life extension domain and the second half-life extension domain comprises an IgG1 Fc domain or fragment thereof including the mutations S354C and T366W to form the ‘knob’ in the second half-life extension domain, numbered according to the Kabat EU numbering system.

[0064] In some embodiments, the first and second half-life extension domains are each an IgG1 Fc domain or fragment thereof and each comprise an amino substitution at position 297, numbered according to the Kabat EU numbering system.

[0065] In some embodiments, the first and second half-life extension domains are each an IgG1 Fc domain or fragment thereof and each comprise the amino substitution N297A, numbered according to the Kabat EU numbering system.

[0066] In some embodiments, the first and second half-life extension domains are each an IgG1 Fc domain or fragment thereof and each comprise an amino substitution at position 253, numbered according to the Kabat EU numbering system.

[0067] In some embodiments, the first and second half-life extension domains are each an IgG1 Fc domain or fragment thereof and each comprise the amino substitution I253A, numbered according to the Kabat EU numbering system.

[0068] In some embodiments, the first half-life extension domain comprises the amino acid sequence of SEQ ID NO: 9, and the second half-life extension domain thereof comprises the amino acid sequence of SEQ ID NO: 12.

[0069] In some embodiments, the first half-life extension domain comprises the amino acid sequence of SEQ ID NO: 10 and the second half-life extension domain thereof comprises the amino acid sequence of SEQ ID NO: 13.

[0070] In some embodiments, the half life extension domain (HL) comprises an Fc region of an antibody (i.e. the C-terminal region of an immunoglobulin heavy chain) or a fragment thereof comprising dimerized Fc domains (HL1-HL2). Although the boundaries of the Fc region of an immunoglobulin heavy chain might 30 vary, the human IgG heavy-chain Fe region is usually defined to stretch from an amino acid residue at position Cys226, or from Pro230, to the carboxyl-terminus thereof. In some embodiments, the dimerized Fc domains of an antibody (HL1-HL2) comprises a first half life extension domain and a second half life extension domain as described anywhere herein, where the first half-life extension moiety comprises a first Fc domain or a fragment thereof and the second half-life extension moiety comprises a second Fc domain or a fragment thereof. In some embodiments, HL2 is a component of the polypeptide chain and HL1 is dimerized to HL2.

[0071] In some embodiments, the first and second half-life extension moieties are each an IgG1 Fc domain or fragment thereof. In some embodiments, the first half-life extension moiety comprises an IgG1 Fc domain or fragment thereof including the mutation I253A and the second half-life extension moiety comprises an IgG1 Fc domain or fragment thereof including the mutation I253A. In some embodiments, the first and second half-life extension moieties are derived from the sequence for human IgG1 Immunoglobulin heavy constant gamma I having SEQ ID NO: 6 (the ‘parent sequence’), such that the first and second half-life extension moieties each comprise SEQ ID NO: 7 or fragment thereof, with one or more amino acid modifications. In some embodiments, the first and second half-life extension moieties comprise SEQ ID NO: 7 with amino substitutions to promote association of the first and second half-life extension moieties according to the ‘knob into holes’ approach. In some embodiments, the sequence SEQ ID NO: 7 contains mutations Y349C; T366S; L38A; and Y407V (numbered according to the Kabat EU numbering system) to form the ‘hole’ in the first half-life extension moiety and mutations S354C and T366W (numbered according to the Kabat EU numbering system) to form the ‘knob’ in the second half-life extension moiety.

[0072] In some embodiments, the first and second half-life extension moieties each further comprise amino substitution N297A, numbered according to the Kabat EU numbering system. In some embodiments, the first and second half-life extension moieties each further comprise the amino substitution I253A, numbered according to the Kabat EU numbering system. In some embodiments, the first and second half-life extension moieties each further comprise both the amino substitutions N297A and I253A, numbered according to the Kabat EU numbering system. In some embodiments, the first half-life extension moiety comprises an amino acid sequence having about or at least about 85%, 86%, 87%, 88%, 89%, 90%, 91%, 92%, 93%, 94%, 95%, 96%, 97%, 98%, or 99% sequence identity to any one of the amino acid sequence of any one of SEQ ID NOs: 7, 8, 9 and 10. In some embodiments, the second half-life extension moiety comprises an amino acid sequence having about or at least about 85%, 86%, 87%, 88%, 89%, 90%, 91%, 92%, 93%, 94%, 95%, 96%, 97%, 98%, or 99% sequence identity to any one of the amino acid sequence of any one of SEQ ID NOs: 7, 11, 12 and 13.

[0073] In some embodiments, the cytokine moiety comprises a wild-type cytokine moiety or variant cytokine moiety.

[0074] In some embodiments, the cytokine moiety is an IL-2 cytokine moiety as described anywhere herein.

[0075] In some embodiments, the IL-2 cytokine moiety comprises a wild-type IL-2 cytokine moiety or variant thereof.

[0076] In some embodiments, the IL-2 cytokine moiety comprises an IL-2 cytokine or fragment thereof.

[0077] In some embodiments, the IL-2 cytokine or functional fragment thereof is modified compared to the sequence of a mature IL-2 having SEQ ID NO: 2.

[0078] In some embodiments, the modified IL-2 cytokine or functional fragment thereof comprises modifications R38A, F42A, Y45A, and E62A relative to the sequence of a mature IL-2 having SEQ ID NO: 2.

[0079] In some embodiments, the modified IL-2 cytokine or functional fragment thereof comprises the modification C125A relative to the sequence of a mature IL-2 having SEQ ID NO: 2.

[0080] In some embodiments, the modified IL-2 cytokine or functional fragment thereof comprises R38A, F42A, Y45A, E62A and C125A relative to the sequence of a mature IL-2 having SEQ ID NO: 2.

[0081] In some embodiments, the IL-2 cytokine or functional fragment thereof comprises an amino acid sequence of SEQ ID NO: 3.

[0082] In some embodiments, the masking moiety comprises IL-2Rβ or a fragment, portion or variant thereof.

[0083] In some embodiments, the IL-2Rβ or a fragment, portion or variant thereof comprises an amino acid sequence of SEQ ID NO: 4.

[0084] In some embodiments, the IL-2Rβ or a fragment, portion or variant thereof has a mutation at amino acid positions C122 as compared to IL-20 of SEQ ID NO: 4.

[0085] In some embodiments, the IL-2Rβ or a fragment, portion or variant thereof has a mutation at amino acid positions C168 as compared to IL-20 of SEQ ID NO: 4.

[0086] In some embodiments, the IL-2RH or a fragment, portion or variant thereof has mutations at amino acid positions C122 and C168 as compared to IL-20 of SEQ ID NO: 4.

[0087] In some embodiments, the IL-2R or a fragment, portion or variant thereof has mutations C122S and C168S as compared to IL-20 of SEQ ID NO: 4.

[0088] In some embodiments, wherein the IL-2Rβ or a fragment, portion or variant thereof comprises an amino acid sequence of SEQ ID NO: 5.

[0089] In some embodiments, the cytokine moiety is an IL-12 cytokine moiety as described anywhere herein.

[0090] In some embodiments, the IL-12 cytokine moiety comprises a wild-type IL-12 cytokine moiety or variant thereof.

[0091] In some embodiments, the IL-12 cytokine moiety comprises an IL-12 cytokine or fragment thereof.

[0092] In some embodiments, the IL-12 cytokine or functional fragment thereof comprises an IL-12p40 polypeptide or functional fragment thereof covalently linked to an IL-12p35 polypeptide or functional fragment thereof.

[0093] In some embodiments, the IL-12p40-IL-12p35 linker is between 5 and 20 amino acids in length.

[0094] In some embodiments, the IL-12p40-IL-12p35 linker is rich in amino acid residues G and S.

[0095] In some embodiments, the IL-12p40-IL-12p35 linker comprises SEQ ID NO: 116 (GGGGSGGGGSGGGGS).

[0096] In some embodiments, the IL-12p40 polypeptide comprises SEQ ID NO: 204 (as shown in the IL-12 Cytokine Moieties table in the description) or an amino acid sequence having at least one amino acid modification as compared to the amino acid sequence of SEQ ID NO: 204 (as shown in the IL-12 Cytokine Moieties table in the description).

[0097] In some embodiments, the IL-12p40 polypeptide comprises SEQ ID NO: 204 (as shown in the IL-12 Cytokine Moieties table in the description).

[0098] In some embodiments, the IL-12p40 polypeptide comprises at least one amino acid modification to the GAG-binding domain (KSKREKKDRV) as compared to the amino acid sequence of SEQ ID NO: 204 (as shown in the IL-12 Cytokine Moieties table in the description).

[0099] In some embodiments, the IL-12p40 polypeptide comprises SEQ ID NO: 205 (as shown in the IL-12 Cytokine Moieties table in the description).

[0100] In some embodiments, the IL-12p40 polypeptide comprises SEQ ID NO: 206 (as shown in the IL-12 Cytokine Moieties table in the description).

[0101] In some embodiments, the IL-12p40 polypeptide comprises an amino acid sequence having one or more cysteine substitution mutations as compared to the amino acid sequence of SEQ ID NO: 204 (as shown in the IL-12 Cytokine Moieties table in the description).

[0102] In some embodiments, the IL-12p40 polypeptide comprises SEQ ID NO: 207 (as shown in the IL-12 Cytokine Moieties table in the description).

[0103] In some embodiments, the IL-12p40 polypeptide comprises SEQ ID NO: 208 (as shown in the IL-2 Cytokine Moieties table in the description).

[0104] In some embodiments, the IL-12p35 polypeptide comprises SEQ ID NO: 209 (as shown in the IL-12 Cytokine Moieties table in the description) or an amino acid sequence having at least one amino acid modification as compared to the amino acid sequence of SEQ ID NO: 209 (as shown in the IL-12 Cytokine Moieties table in the description).

[0105] In some embodiments, the IL-12p35 polypeptide comprises SEQ ID NO: 209 (as shown in the IL-12 Cytokine Moieties table in the description).

[0106] In some embodiments, the IL-12 cytokine or functional fragment thereof comprises SEQ ID NO: 210 (as shown in the IL-12 Cytokine Moieties table in the description).

[0107] In some embodiments, the IL-12 cytokine or functional fragment thereof comprises SEQ ID NO: 211 (as shown in the IL-12 Cytokine Moieties table in the description).

[0108] In some embodiments, the IL-12 cytokine or functional fragment thereof comprises SEQ ID NO: 212 (as shown in the IL-12 Cytokine Moieties table in the description).

[0109] In some embodiments, the IL-12 cytokine or functional fragment thereof comprises SEQ ID NO: 213 (as shown in the IL-12 Cytokine Moieties table in the description).

[0110] In some embodiments, the IL-12 cytokine or functional fragment thereof comprises SEQ ID NO: 214 (as shown in the IL-12 Cytokine Moieties table in the description).

[0111] In some embodiments, the masking moiety comprises an IL-12 cytokine receptor, or a subunit or functional fragment thereof.

[0112] In some embodiments, the masking moiety comprises the extracellular domain of human IL-12Rβ1 or a fragment, portion, or variant thereof that retains or otherwise demonstrates an affinity to IL-12.

[0113] In some embodiments, the masking moiety comprises residues 24 to 237 of human IL-12Rβ1, namely a sequence having SEQ ID NO: 215 (as shown in the IL-12 Masking Moieties table in the description).

[0114] In some embodiments, the masking moiety comprises residues 24 to 545 of human IL-12Rβ1, namely a sequence having SEQ ID NO: 216 (as shown in the IL-12 Masking Moieties table in the description).

[0115] In some embodiments, the masking moiety comprises the extracellular domain of human IL-12Rβ2 or a fragment, portion, or variant thereof that retains or otherwise demonstrates an affinity to IL-12.

[0116] In some embodiments, the masking moiety comprises residues 24 to 212 of human IL-12Rβ2, namely a sequence having SEQ ID NO: 217 (as shown in the IL-12 Masking Moieties table in the description).

[0117] In some embodiments, the masking moiety comprises residues 24 to 222 of human IL-12Rβ2, namely a sequence having SEQ ID NO: 218 (as shown in the IL-12 Masking Moieties table in the description), or the masking moiety comprises residues 24 to 227 of human IL-12Rβ2, namely a sequence having SEQ ID NO: 222 (as shown in the IL-12 Masking Moieties table in the description).

[0118] In some embodiments, the masking moiety comprises residues 24 to 319 of human IL-12Rβ2, namely a sequence having SEQ ID NO: 219 (as shown in the IL-12 Masking Moieties table in the description).

[0119] In some embodiments, the masking moiety comprises at least one amino acid modification as compared to the sequence of SEQ ID NO: 219 (as shown in the IL-12 Masking Moieties table in the description), optionally wherein said modifications are cysteine substitution mutations.

[0120] In some embodiments, the masking moiety comprises SEQ ID NO: 220 (as shown in the IL-12 Masking Moieties table in the description).

[0121] In some embodiments, the masking moiety comprises residues 24 to 622 of human IL-12Rβ2, namely a sequence having SEQ ID NO: 221 (as shown in the IL-12 Masking Moieties table in the description).

[0122] In some embodiments, the cytokine moiety is an IL-15 cytokine moiety as described anywhere herein.

[0123] In some embodiments, the IL-15 cytokine moiety comprises a wild-type IL-15 cytokine moiety or variant thereof.

[0124] In some embodiments, the cytokine moiety is an IL-15 cytokine moiety and the masked cytokine further comprises a domain comprising an IL-15Rα subunit or a functional fragment thereof (‘IL-15Rα domain’). In some embodiments, the cytokine moiety is an IL-15 cytokine moiety and the masked cytokine further comprises a domain comprising an IL-15Rα subunit or a functional fragment thereof (‘IL-15Rα domain’), and the IL-15Rα domain and the IL-15 cytokine moiety are present in different polypeptide chains in the construct and the IL-15Rα domain is non-covalently linked to the IL-15 cytokine moiety.

[0125] The ‘IL-15Rα domain’ herein can consist of the sequence of the wild-type sushi domain sIL-15Rα or a variant thereof, such as the sequence of the wild-type sushi domain sIL-15Rα with one or more e.g. 1, 2, 3 or 4 amino acid substitutions. In some embodiments, the IL-15Rα domain comprises an amino acid substitution at position R26. In some embodiments, the IL-15Rα domain comprises amino acid substitution R26N. In some embodiments, the IL-15Rα domain comprises amino acid substitution R26S. In some embodiments, the IL-15Rα domain comprises an amino acid substitution at position R35. In some embodiments, the IL-15Rα domain comprises amino acid substitution R35Q. In some embodiments, the IL-15Rα domain comprises amino acid substitution R35S. In some embodiments, the IL-15Rα domain comprises an amino acid substitution at positions R26 and R35. In some embodiments, the IL-15Rα domain comprises amino acid substitutions R26S or R26N, and R35Q or R35S. In some embodiments, the IL-15Rα domain comprises amino acid substitutions R26N and R35Q.

[0126] In some embodiments, the IL-15 cytokine moiety comprises an IL-15 cytokine or fragment thereof.

[0127] In some embodiments, the IL-15 cytokine or fragment thereof comprises SEQ ID NO: 224 (as shown in the IL-15 Cytokine Moieties table in the description) or a functional fragment thereof.

[0128] In some embodiments, the IL-15 cytokine or functional fragment thereof comprises an amino acid sequence of SEQ ID NO: 224 (as shown in the IL-15 Cytokine Moieties table in the description).

[0129] In some embodiments, the IL-15 cytokine or functional fragment thereof comprises an amino acid sequence having at least one amino acid modification as compared to the amino acid sequence of SEQ ID NO: 224 (as shown in the IL-15 Cytokine Moieties table in the description).

[0130] In some embodiments, the IL-15 cytokine or functional fragment thereof comprises an amino acid sequence having one or more amino acid substitutions at positions D22, E46, E53 as compared to the amino acid sequence of SEQ ID NO: 224 (as shown in the IL-15 Cytokine Moieties table in the description).

[0131] In some embodiments, the IL-15 cytokine or functional fragment thereof comprises an amino acid sequence having one or more amino acid substitutions at positions D22, E46, E53, N71, N79, or N112 as compared to the amino acid sequence of SEQ ID NO: 224 (as shown in the IL-15 Cytokine Moieties table in the description).

[0132] In some embodiments, the IL-15 cytokine or functional fragment thereof comprises an amino acid sequence having an amino acid substitution at position N71 and N79 as compared to the amino acid sequence of SEQ ID NO: 224 (as shown in the IL-15 Cytokine Moieties table in the description).

[0133] In some embodiments, the IL-15 cytokine or functional fragment thereof comprises an amino acid sequence having an amino acid substitution at position N71 and N112 as compared to the amino acid sequence of SEQ ID NO: 224 (as shown in the IL-15 Cytokine Moieties table in the description).

[0134] In some embodiments, the IL-15 cytokine or functional fragment thereof comprises an amino acid sequence having an amino acid substitution at position N79 and N112 as compared to the amino acid sequence of SEQ ID NO: 224 (as shown in the IL-15 Cytokine Moieties table in the description).

[0135] In some embodiments, the IL-15 cytokine or functional fragment thereof comprises an amino acid sequence having an amino acid substitution at position N71. N79 and N112 as compared to the amino acid sequence of SEQ ID NO: 224 (as shown in the IL-15 Cytokine Moieties table in the description).

[0136] In some embodiments, the IL-15 cytokine or functional fragment thereof comprises an amino acid sequence of SEQ ID NO: 225 (as shown in the IL-15 Cytokine Moieties table in the description).

[0137] In some embodiments, the IL-15 cytokine or functional fragment thereof comprises an amino acid sequence of SEQ ID NO: 226 (as shown in the IL-15 Cytokine Moieties table in the description).

[0138] In some embodiments, the IL-15 cytokine or functional fragment thereof comprises an amino acid sequence of SEQ ID NO: 227 (as shown in the IL-15 Cytokine Moieties table in the description).

[0139] In some embodiments, the IL-15 cytokine or functional fragment thereof comprises an amino acid sequence 20 of SEQ ID NO: 228 (as shown in the IL-15 Cytokine Moieties table in the description).

[0140] In some embodiments, the IL-15 cytokine or functional fragment thereof comprises an amino acid sequence of SEQ ID NO: 229 (as shown in the IL-15 Cytokine Moieties table in the description).

[0141] In some embodiments, the IL-15 cytokine or functional fragment thereof comprises an amino acid sequence of SEQ ID NO: 230 (as shown in the IL-15 Cytokine Moieties table in the description).

[0142] In some embodiments, the IL-15 cytokine or functional fragment thereof comprises an amino acid sequence of SEQ ID NO: 233 (as shown in the IL-15 Cytokine Moieties table in the description).

[0143] In some embodiments, the IL-15 cytokine or functional fragment thereof comprises an amino acid sequence of SEQ ID NO: 234 (as shown in the IL-15 Cytokine Moieties table in the description).

[0144] In some embodiments, the IL-15 cytokine or functional fragment thereof comprises an amino acid sequence of SEQ ID NO: 235 (as shown in the IL-15 Cytokine Moieties table in the description).

[0145] In some embodiments, the IL-15 cytokine or functional fragment thereof comprises an amino acid sequence of SEQ ID NO: 236 (as shown in the IL-15 Cytokine Moieties table in the description).

[0146] In some embodiments, the IL-15 cytokine or functional fragment thereof comprises an amino acid sequence of SEQ ID NO: 237 (as shown in the IL-15 Cytokine Moieties table in the description).

[0147] In some embodiments, the IL-15 cytokine or functional fragment thereof comprises an amino acid sequence of SEQ ID NO: 238 (as shown in the IL-15 Cytokine Moieties table in the description).

[0148] In some embodiments, the IL-15 cytokine or functional fragment thereof comprises an amino acid sequence of SEQ ID NO: 239 (as shown in the IL-15 Cytokine Moieties table in the description).

[0149] In some embodiments, the IL-15 cytokine or functional fragment thereof comprises an additional mutation at position N71.

[0150] In some embodiments, the IL-15 cytokine or functional fragment thereof comprises an additional mutation at position S73.

[0151] In some embodiments, the IL-15 cytokine or functional fragment thereof comprises an additional mutation at one or more of amino acid positions N72, N79, V80, T81, and N112.

[0152] In some embodiments, the masking moiety comprises IL-15Rβ or a fragment or variant thereof.

[0153] In some embodiments, the masking moiety comprises the amino acid sequence of SEQ ID NO: 240 (as shown in the IL-15 Masking Moieties table in the description).

[0154] In some embodiments, the masking moiety comprises IL-15Rβ variant or a fragment thereof having an amino acid substitution at position C122.

[0155] In some embodiments, the masking moiety comprises IL-15Rβ variant or a fragment thereof having amino acid substitution C122S.

[0156] In some embodiments, the masking moiety comprises IL-15Rβ variant or a fragment thereof having an amino acid substitution at position C168.

[0157] In some embodiments, the masking moiety comprises IL-15Rβ variant or a fragment thereof having amino acid substitution C168S.

[0158] In some embodiments, the masking moiety comprises IL-15Rβ variant or a fragment thereof having an amino acid substitution at positions C122 and C168.

[0159] Provided herein is a cleavage product capable comprising an active therapeutic moiety, preparable by proteolytic cleavage of the proteolytically cleavable linker in the polypeptide drug constructs as described anywhere herein.

[0160] Provided herein is a nucleic acid encoding any one of the polypeptide drug constructs as described anywhere herein described herein.

[0161] Provided herein is a nucleic acid encoding one of the chains of any one of the polypeptide drug constructs as described anywhere herein described herein.

[0162] Provided herein is a vector comprising a nucleic acid described herein.

[0163] Provided herein is a vector comprising a nucleic acid encoding a polypeptide drug construct as described anywhere herein described herein.

[0164] Provided herein is a vector comprising a nucleic acid encoding one of the chains of a polypeptide drug constructs as described anywhere herein described herein.

[0165] Provided herein is a host cell comprising a nucleic acid described herein.

[0166] In one embodiment, the host cell is a HEK cell. In another embodiment, the host cell is a CHO cell.

[0167] Provided herein is a composition comprising any one of the polypeptide drug constructs as described anywhere herein described herein.

[0168] Provided herein is a pharmaceutical composition comprising any one of the polypeptide drug constructs as described anywhere herein described herein, and a pharmaceutically acceptable carrier.

[0169] Provided herein is a kit comprising any one of the polypeptide drug constructs as described anywhere herein, or the compositions, or the pharmaceutical compositions described herein.

[0170] Provided herein is a method of producing any one of the polypeptide drug constructs as described anywhere herein, comprising culturing a host cell described herein under a condition that produces the polypeptide drug construct.

[0171] Provided herein is a nucleic acid encoding any one of the cleavage products described herein.

[0172] Provided herein is a composition comprising any one of the cleavage products described herein.

[0173] Provided herein is a pharmaceutical composition comprising any one of the cleavage products described herein, and a pharmaceutically acceptable carrier.

[0174] Provided herein is a polypeptide drug construct as described herein for use in medicine.

[0175] Provided herein is a cleavage product as described herein for use in medicine.

[0176] Provided herein is a method of treating or preventing cancer in a subject, the method comprising administering to the subject an effective amount of a polypeptide drug construct as described herein.

[0177] Provided herein is a method of treating or preventing cancer in a subject, the method comprising administering to the subject an effective amount of a composition as described herein.

[0178] Provided herein is a method of treating or preventing cancer in a subject, the method comprising administering to the subject an effective amount of a pharmaceutical composition as described herein.

[0179] Provided herein is a method of treating or preventing cancer in a subject, the method comprising administering to the subject an effective amount of a polypeptide drug construct as described herein, whereby the polypeptide drug construct is proteolytically cleaved in vitro to produce a cleavage product as described herein.

[0180] Provided herein is a method of treating or preventing cancer in a subject, the method comprising a step of producing a cleavage product in vivo that is capable of binding to its target protein, where the cleavage product is as described herein.

[0181] Provided herein is a polypeptide drug construct as described herein for use in treating or preventing cancer.

[0182] Provided herein is a polypeptide drug construct as described herein for use in a method of treating or preventing cancer, the method comprising administering to the subject an effective amount of the polypeptide drug construct, whereby the polypeptide drug construct is proteolytically cleaved in vivo to produce a cleavage product as described herein.

[0183] Provided herein is a cleavage product as described herein for use in treating or preventing cancer.

[0184] Provided herein is a cleavage product as described herein for use in treating or preventing cancer, the method comprising a step of administering a polypeptide drug construct as described herein to a patient, thereby producing the cleavage product by proteolytic cleavage of the masked cytokine in vivo.

[0185] Provided herein is a cleavage product as described herein for use in a method of treating or preventing cancer in a subject, the method comprising a step of producing the cleavage product by in vivo proteolytic cleavage from a polypeptide drug construct as described herein that has been administered to the subject.

### BRIEF DESCRIPTION OF THE DRAWINGS

[0186] FIG. 1 shows the structure of exemplary embodiments of a masked cytokine that includes a masking moiety, a cytokine or functional fragment thereof (“cytokine”), a half-life extension moiety, and a first linker that includes a first cleavable peptide (“ICP”), a first N-terminal spacer domain (“INSD”), and a first C-terminal spacer domain (“ICSD”). These exemplary embodiments also include a second linker that includes a second cleavable peptide (“2CP”), a second N-terminal spacer domain (“2NSD”), and a second C-terminal spacer domain (“2CSD”). As shown by the arrows, while the exemplary embodiments shows the masking moiety linked to the first linker, and the cytokine or functional fragment thereof is linked to the first linker and the second linker, the masking moiety and the cytokine or functional fragment thereof can be interchanged such that the cytokine or functional fragment thereof is linked to the first linker, and the masking moiety is linked to the first linker and the second linker. FIG. 1 shows the structure of an exemplary embodiment of a masked cytokine as a monomer.

[0187] FIG. 2 shows the structure of an exemplary embodiment of a masked cytokine that includes a masking moiety, a cytokine or functional fragment thereof (“cytokine”), a first half-life extension moiety, and a second half-life extension moiety. The exemplary embodiment shown in FIG. 2 also includes a first linker that includes a first cleavable peptide (“ICP”), a first N-terminal spacer domain (“INSD”), and a first C-terminal spacer domain (“ICSD”), and a second linker that includes a second cleavable peptide (“2CP”), a second N-terminal spacer domain (“2NSD”), and a second C− terminal spacer domain (“2CSD”). The exemplary first and second half-life extension moieties include “knobs into holes” modifications that promote the association of the first half-life extension moiety with the second half-life extension moiety, as shown by the “hole” in the first half-life extension moiety and the “knob” in the second half-life extension moiety. The first half-life extension moiety and the second half-life extension moiety are also shown as associating, at least in part, due to the formation of disulfide bonds. It is to be understood that although the “hole” is depicted as part of the first half-life extension moiety (linked to the masking moiety) and the “knob” is depicted as part of the second half-life extension moiety (linked to the cytokine), the “hole” and the “knob” can alternatively be included in the second half-life extension moiety and the first half-life extension moiety, respectively, so that the “hole” is a part of the second half-life extension moiety (linked to the cytokine) and the “knob” is part of the first half-life extension moiety (linked to masking moiety).

[0188] FIGS. 3A-B shows exemplary embodiments of masked cytokines prior to (left) and after (right) cleavage by a protease, such as at the tumor microenvironment. FIGS. 3A-B show exemplary embodiments of a masked IL-2 cytokine. Cleavage by a protease releases a masking moiety (e.g., IL-2Rβ, as shown in FIG. 38), or releases an IL-2 (FIG. 3A).

[0189] FIG. 4 shows SDS-PAGE analysis on flow-through (FT) samples (i.e., proteins that did not bind to the Protein A column) and the eluted (E) samples (i.e., proteins that bound to the Protein A column and were eluted from it) following production and purification of IL-2 constructs (AK304, AK305, AK307, AK308, AK309, AK310, AK311, AK312, AK313, AK314, and AK315).

[0190] FIG. 5A-D shows results from SPR analysis that tested the binding of an exemplary masked IL-2 polypeptide construct (AK168), or a rhIL-2 control, to CD25-Fc. FIG. 5A shows the interaction between AK168 and CD25-Fc, FIG. 5 shows the interaction between AK168 activated with MMP and CD25-Fc. and FIG. 5C shows the interaction between a recombinant human IL-2 (rhIL2) control and CD25-Fc. FIG. 5D provides a table summarizing the data obtained for the association constant (ka), dissociation constant (kd), equilibrium dissociation constant (KD), as well as the Chi2 value and U-value for each interaction.

[0191] FIGS. 6A-D shows results from SPR analysis that tested the binding of an exemplary masked IL-2 polypeptide constructs (AK111), or a rhIL2 control, to CD122-Fc. FIG. 6A shows the interaction between AK111 and CD122-Fc. FIG. 6B shows the interaction between AK111 activated with protease and CD122-Fc, and FIG. 6C shows the interaction between a recombinant human IL-2 (hIL-2) control and CD122-Fc. FIG. 6D provides a table summarizing the data obtained for the association constant (ka), dissociation constant (kd), equilibrium dissociation constant (KD), as well as the Chi2 value and U− value for each interaction.

[0192] FIG. 7A shows an exemplary embodiment of a masked cytokines prior to (left) and after (right) cleavage by a protease, such as at the tumor microenvironment. FIG. 7B shows SDS-PAGE analysis of an exemplary masked IL-2 polypeptide construct that was incubated in the absence (left lane) or presence (right lane) of the MMP10 protease, which demonstrates the release of IL-2 from the Fe portion.

[0193] FIGS. 8A-D shows STAT5 activation (%) in PBMCs treated with the construct AK032, AK035, AK041, or rhIL-2 as a control. The levels of STAT5 activation (%) are shown for NK cells. CD8+ T cells, effector T cells (Teff), and regulatory T cells (Treg), as determined following incubation with rhIL-2 (FIG. 8A), AK032 (FIG. 8B). AK035 (FIG. 8C), or AK041 (FIG. 8D).

[0194] FIGS. 9A-C shows STAT5 activation (%) in PBMCs treated with the construct AK081 or AK032. The AK081 construct with and without prior exposure to MMP10 was tested. An isotype control as well as a no IL-2 negative control was also tested. The levels of STAT5 activation (%) are shown for NK cells (FIG. 9A), CD8+ T cells (FIG. 9C), and CD4+ T cells (FIG. 9B).

[0195] FIGS. 10A-10D shows the results from STAT5 activation studies in PBMCs using constructs AK081 and AK111, as well as controls that included an rhIL-2 and anti-RSV antibody. A no-treatment control was also tested. EC50 (pM) is also shown for the rhIL-2, AK081, and AK111 treatments. STAT5 activation (%) is shown for CD4+FoxP3+CD25+ cells (FIG. 10A), CD8+ cells (FIG. 10B), and CD4+FoxP3−CD25− cells (FIG. 10C). FIG. 10D provides EC50 (pM) and fold-change data for the AK081, AK111 constructs, as well as the rhIL-2 control.

[0196] FIGS. 11A-D shows the results from STAT5 activation studies in PBMCs using constructs AK167 and AK168, as well as controls that included an rhIL-2 and anti-RSV antibody. A no-treatment control was also tested. EC50 (pM) is also shown for the rhIL-2, AK167, and AK168 treatments. STAT5 activation (%) is shown for CD4+FoxP3+CD25+ cells (FIG. 11A), CD8+ cells (FIG. 11B), and CD4+FoxP3−CD25− cells (FIG. 11C). FIG. 11D provides EC50 (pM) and fold-change data for the AK167 and AK168 constructs, as well as the rhIL-2 control.

[0197] FIGS. 12A-12D shows STAT5 activation (%) in PBMCs treated with the construct AK165 or AK166, or an isotype control or an IL-2-Fc control, that were (+MMP10) or were not previously exposed to the MMP10 protease. The key as shown in FIG. 12A also applies to FIG. 12B, and the key as shown in FIG. 12C also applies to FIG. 12D. STAT5 activation (%) is shown for CD4+FoxP3+T regulatory cells (FIG. 12A), CD4+FoxP3− T helper cells (FIG. 12B), CD8+ cytotoxic T cells (FIG. 12C), and CD56+NK cells (FIG. 12D).

[0198] FIGS. 13A-13C shows STAT5 activation (%) in PBMCs treated with the construct AK109 or AK1110, or an isotype control or an IL-2-Fc control, that were (+MMP10) or were not previously exposed to the MMP10 protease. The key as shown in FIG. 12B also applies to FIG. 13A. STAT5 activation (%) is shown for NK cells (FIG. 13A), CD8 cells (FIG. 13B), and CD4 cells (FIG. 17C).

[0199] FIGS. 14A-14D shows the results from STAT5 activation studies in PBMCs using the constructs AK211, AK235, AK253, AK306, AK310, AK314, and AK316, as well as an rhIL-2 control. STAT5 activation (%) is shown for CD3+CD4+FoxP3+ cells (FIG. 14A). CD3+CD4+FoxP3− cells (FIG. 14B), and CD3+CD8+ cells (FIG. 14C). FIG. 14D provides EC50 data for each of the tested constructs as well as the rhIL-2 control.

[0200] FIGS. 15A-15D shows the results from STAT5 activation studies in PBMCs using the constructs AK081, AK167, AK216, AK218, AK219, AK220, and AK223 that have been activated by protease, as well as an rhIL-2 control. STAT5 activation (%) is shown for CD4+FoxP3+CD25+ regulatory T cells (FIG. 15A), CD4+FoxP3−CD25− cells (FIG. 15B), and CD8+ cells (FIG. 15C). FIG. 15D provides EC50 data for each of the tested constructs as well as the rhIL-2 control.

[0201] FIGS. 16A-16C shows STAT5 activation (%) in PBMCs treated with the construct AK081, AK189, AK190, or AK210, or an anti-RSV control. The key as shown in FIG. 16A also applies to FIGS. 16B and 16C. STAT5 activation (%) is shown for regulatory T cells (FIG. 16A), CD4 helper T cells (FIG. 16B), and CD8 cells (FIG. 16C).

[0202] FIGS. 17A-17C shows STAT5 activation (%) in PBMCs treated with the construct AK167, AK191, AK192, or AK193, or an anti-RSV control. The key as shown in FIG. 17A also applies to FIGS. 17B and 17C. STAT5 activation (%) is shown for regulatory T cells (FIG. 17A), CD4 helper T cells (FIG. 17B), and CD8 cells (FIG. 17C).

[0203] FIGS. 18A-18D show results from pharmacokinetic studies carried out in tumor-bearing mice using the construct AK032, AK081, AK111, AK167, or AK168, or an anti-RSV control. FIG. 15A provides a simplistic depiction of the structure of each of the constructs tested. FIG. 18B shows Fc levels in plasma (μg/mL) by detecting human IgG, FIG. 18C shows Fc-CD122 levels in plasma (μg/mL) by detecting human CD122, and FIG. 18D shows Fc-IL2 levels in plasma (μg/mL) by detecting human IL-2. Prior to the detection step, an anti-human IG was used as the capture antibody.

[0204] FIGS. 19A-19D show results from pharmacokinetic studies carried out in tumor-bearing mice using the construct AK167, AK191 AK197, AK203, AK209, or AK211, or an anti-RSV control. FIG. 19A provides a simplistic depiction of the structure of each of the constructs tested. FIG. 19B shows Fc levels in plasma (μg/mL) by detecting human IgG, FIG. 19C shows Fc-IL2 levels in plasma (μg/mL) by detecting human IL-2, and FIG. 19D shows Fc-CD122 levels in plasma (μg/mL) by detecting human CD122. Prior to the detection step, an anti-human IG was used as the capture antibody.

[0205] FIGS. 20A-20L shows results from studies testing the in vivo responses of CD4, CDR. NK, and Treg percentages in spleen, blood, and tumor, using the AK032, AK081, AK111, AK167, or AK168 construct, or an anti-RSV IgG control. For spleen tissue,% CDR cells of CD3 cells (FIG. 20A), % CD4 of CD3 cells (FIG. 20B), % NK cells of CD3− cells (FIG. 20C). % FoxP3 of CD4 cells (FIG. 20D) is shown. For blood. % CD8 cells of CD3 cells (FIG. 20E), % CD4 of CD3 cells (FIG. 20F), % NK cells of CD3− cells (FIG. 20G), % FoxP3 of CD4 cells (FIG. 20H) is shown. For tumor tissue, % CDR cells of CD3 cells (FIG. 20I). % CD4 of CD3 cells (FIG. 20J), % NK cells of CD3− cells (FIG. 20K). % FoxP3 of CD4 cells (FIG. 20L) is shown.

[0206] FIGS. 21A-21L shows results from studies testing the in vivo responses of CD4. CD8, NK, and Treg percentages in spleen, blood, and tumor, using the AK167, AK168, AK191, AK197, AK203, AK209, or AK211 construct, or an anti-RSV IgG control. For spleen tissue, % CDR cells of CD3 cells (FIG. 21A), % CD4 of CD3 cells (FIG. 21B). % NK cells of CD3− cells (FIG. 21C), % FoxP3 of CD4 cells (FIG. 21D) is shown. For blood, % CD8 cells of CD3 cells (FIG. 21E), % CD4 of CD3 cells (FIG. 21F), % NK cells of CD3− cells (FIG. 21G). % FoxP3 of CD4 cells (FIG. 21H) is shown. For tumor tissue. % CD8 cells of CD3 cells (FIG. 21I). % CD4 of CD3 cells (FIG. 21J), % NK cells of CD3− cells (FIG. 21K), % FoxP3 of CD4 cells (FIG. 21L) is shown.

[0207] FIGS. 22A-22L shows results from studies testing the in vivo responses of CD4, CD8, NK, and Treg percentages in spleen, blood, and tumor, using the AK235, AK191, AK192, AK193, AK210, AK189, AK190, or AK211 construct, or an anti-RSV IgG control. For spleen tissue, % CD8 cells of CD3 cells (FIG. 22A), % CD4 of CD3 cells (FIG. 22B). % NK cells of CD3− cells (FIG. 22C). % FoxP3 of CD4 cells (FIG. 22D) is shown. For blood, % CD8 cells of CD3 cells (FIG. 22E), % CD4 of CD3 cells (FIG. 22F), % NK cells of CD3− cells (FIG. 22G).% FoxP3 of CD4 cells (FIG. 22H) is shown. For tumor tissue, % CD8 cells of CD3 cells (FIG. 22I), % CD4 of CD3 cells (FIG. 22J), % NK cells of CD3− cells (FIG. 22K), % FoxP3 of CD4 cells (FIG. 22L) is shown.

[0208] FIGS. 23A-23I show results from in vivo T cell activation in spleen, blood, and tumor, using the AK235, AK191, AK192, AK193, AK210, AK189, AK190, or AK211 construct. T cell activation was measured as the mean fluorescence intensity (MFI) of CD25 in CD8+ T cells (FIG. 23A; FIG. 23I); FIG. 23G), CD4+ T cells (FIG. 23B; FIG. 23E; FIG. 23H), or Foxp3+ cells (FIG. 23C; FIG. 23F; FIG. 23I) in the spleen, blood, and tumor. Statistical analysis was performed using One-way ANOVA as compared to the non-cleavable AK211 construct.

[0209] FIG. 24A-24D show the results from studies testing the in vivo cleavage of the exemplary masked IL-2 polypeptide constructs AK168 (cleavable peptide sequence: MPYDLYHP; SEQ ID NO: 24) and AK209 (cleavable peptide sequence: VPLSLY; SEQ ID NO: 28). FIG. 24E shows results from a pharmacokinetic study of total plasma IgG concentration (μg/mL) for total levels of the AK167, AK168, and AK209 constructs, and for levels of non-cleaved forms of each construct.

[0210] FIGS. 25A-25D shows results from an in vivo study that assessed vascular leakage using the exemplary masked IL-2 polypeptide construct AK111 or AK168, or the non-masked IL-2 polypeptide construct AK081 or AK167, or an anti-RSV control. FIG. 25A shows the percentage (%) of body weight loss, and FIGS. 25B, 25C, and 25D shows the weight in grams of the liver, lung, and spleen, respectively, for each.

[0211] FIGS. 26A and 26B shows results from an in vivo study that assessed vascular leakage as indicated by measuring the extent of dye leakage into liver and lung tissue following administration of the AK081, AK111, AK167, or AK168 construct, or an anti-RSV control. The extent of dye leakage into liver (FIG. 26A) and lung (FIG. 26B) was measured based on absorbance at 650 nm.

[0212] FIGS. 27A and 27B shows results from an in vivo study that assessed vascular leakage as indicated by measuring the extent of mononuclear cell perivascular invasion into the liver and lung tissue following administration of the AK081, AK111, AK167, or AK168 construct, or an anti-RSV control. The average number of mononuclear cells in the liver (FIG. 27A) and the average number of mononuclear cells in the lung (FIG. 27B) depicted for each.

[0213] FIGS. 28A and 28B show results from a syngeneic tumor model study that assessed tumor volume and body weight over the course of treatment with the AK032, AK081, AK111, AK167, or AK168 construct, or an anti-RSV control. FIG. 28A shows data on tumor volume over the course of treatment, and FIG. 28B shows data on the percentage (%) change in body weight over the course of the treatment.

[0214] FIGS. 29A and 29B shows AK471 with I253A FcRn mutation induced robust CD8 T cells expansion in the TME while remaining inactive in the periphery.

[0215] FIGS. 30A-30C shows AK471 has slightly shorter half-life compared to a glyco-hIgG1 FIGS. 31A-31C shows there is no evidence of cleavage or decapitation with AK471 in the plasma FIGS. 32A and 32B show results of Example 5.

[0216] FIGS. 33A-33D show results of Example 5.

[0217] FIGS. 34A and 34B shows results of Example 6i. FIGS. 35A and 35B show results of Example 6ii. FIGS. 36A and 36B show results of Example 6iii. FIGS. 37A and 37B show results of Example 6iv. FIGS. 38A and 38B show results of Example 6v. FIGS. 39A and 39B show results of Example 6vi. FIGS. 40A-40D show results of Example 6vii. FIGS. 41A and 41B show results of Example 6viii. FIGS. 42A and 42B show results of Example 6ix. FIGS. 43A and 43B show results of Example 6x.

[0218] FIGS. 44A-D and FIG. 45A-F shows the results of a SDS-PAGE and HEK-Blue IL-2 bioassay using exemplary IL-15 constructs AK904 and AK910 that do not include a peptide substrate, and constructs AK932, AK938, AK930 and AK936 that do include a peptide substrate. FIGS. 44A-D shows the SDS-PAGE gel results. FIGS. 45A-F show the HEK-Blue IL-2 bioassay results.

[0219] FIGS. 46 to 54E show the results from Example 9.

[0220] FIG. 55 to 65 show the results from Example 10.

[0221] FIGS. 55A-D show results from pharmacokinetic studies carried out in CT26 tumor-bearing mice using the construct AK904, AK910, AK930 or AK936. FIG. 55A shows the percentage (%) of body weight loss.

[0222] FIG. 5B shows the volume in mm3 of tumor, and FIGS. 55C and D show the weight in grams of the lung and spleen, respectively, five days after treatment. Statistical analysis was performed using One-way ANOVA as compared to the vehicle group (*P<0.05; **P<0.01; *P<0.001; ****P<0.0001).

[0223] FIGS. 56A-C shows results from studies testing the in vivo responses of NK cells as percentages of CD45+ cells in blood, spleen, and tumor.

[0224] FIGS. 57A-C shows results from studies testing the in vivo responses of NK cell proliferation as MFI of Ki67 in blood, spleen, and tumor.

[0225] FIGS. 58A-C shows results from studies testing the in vivo responses of CD8 T cells as percentages of CD45+ cells in blood, spleen, and tumor.

[0226] FIGS. 59A-C shows results from studies testing the in vivo responses of CD8 T cell proliferation as MF1 of Ki67 in blood, spleen, and tumor.

[0227] FIGS. 64A-C shows results from studies testing the in vivo responses of CD8/Treg ratio in blood, spleen, and tumor.

[0228] FIGS. 61A-D show results from pharmacokinetic studies carried out in B16F10 tumor-bearing mice using the construct AK904, AK910, AK930 and AK936. FIG. 61A shows the percentage (%) of body weight loss, FIG. 60B shows the volume in mm3 of tumor, and FIGS. 61C and D show the weight in grams of the lung and spleen, respectively, five days after treatment. Statistical analysis was performed using One-way ANOVA as compared to the vehicle group (*P<0.05; **P<0.01; ***P<0.001; ****P<0.0001).

[0229] FIGS. 62A-D show results from pharmacokinetic studies carried out, as described Example 10, in B16F10 tumor-bearing mice using the construct AK904, AK910, AK930 and AK936. FIG. 62A shows Fc levels in plasma (ng/mL) by detecting human IgG. FIGS. 62B-D show the half-life, Cmax, and AUC(0-last) calculated by WinNonlin software from the results in FIG. 62A.

[0230] FIGS. 63A-C shows results from studies testing the in vivo responses of NK cells as percentages of CD45+ cells in blood, spleen, and tumor.

[0231] FIGS. 64A-C shows results from studies testing the in vivo responses of CD8 T cells as percentages of CD45+ cells in blood, spleen, and tumor.

[0232] FIGS. 65A-C shows results from studies testing the in vivo responses of CD8/Treg ratio in blood, spleen, and tumor.

[0233] FIGS. 66 and 67 shows results from Example 11.

[0234] FIG. 68 shows the constructs used in Example 4.

[0235] FIG. 69 shows the constructs used in Example 8.

[0236] FIG. 70 shows the flowchart for HEK-Blue IL-2 bioassay, as described in Example 8.

[0237] FIG. 71A-FIG. 71Q shows the constructs in Example 9.

[0238] FIG. 72 shows the flowchart used in ex vivo cleavage assay.

[0239] FIG. 73 shows schematic diagrams of positive controls unmasked AK904 (FIG. 73A) and cleavage control: masked, non-cleavable AK910 (FIG. 73B) as used in Example 10.

[0240] FIG. 74 shows schematic diagrams of masked cleavable molecules used in Example 10, cytokine-substrate construct: AK930 is shown in FIG. 74A, and mask-substrate construct: AK936 is shown in FIG. 74B.

[0241] FIG. 75 shows schematic diagram of the construct as used in Example 11.

[0242] FIG. 76A shows flowchart detailing the process of ex vivo human tumor cleavage assay. FIG. 76B shows flow-chart for evaluation of AK923 cleavage by various tumor cells.

### DETAILED DESCRIPTION

### 1. Polypeptide Drug Constructs

[0243] This invention provides novel tumor-specific proteolytically cleavable peptide linkers and their use in polypeptide drug constructs for delivering a therapeutic moiety to a tumor cell environment. The proteolytically cleavable peptide linker is positioned within the polypeptide drug construct so that when the linker cleaves by protease action in the tumor cell environment, the polypeptide drug construct separates. This invention also relates to cleavage products of said drug constructs, and methods related to the use of the same.

[0244] Protease substrate amino acid sequences DLLAVVAAS and ISSGLLSGRS have been found to demonstrate very specific cleavage in the tumor cell environment compared to non-tumor cell environment. Thus, these proteolytically cleavable peptides advantageously can be used in proteolytically cleavable peptide linkers in polypeptide drug constructs, wherein any systemic side effects of the administered protein therapeutic may be reduced.

[0245] The proteolytically cleavable peptide linker may be bonded directly or indirectly to the therapeutic moiety within the polypeptide drug construct. Where the polypeptide drug construct comprises more than one polypeptide chain, the proteolytically cleavable peptide linker may be present in the same polypeptide chain as the therapeutic moiety or in a different polypeptide chain.

[0246] The part of the construct other than the therapeutic moiety can be considered as a carrier moiety. Where the proteolytically cleavable peptide linker is covalently bonded directly to the therapeutic moiety, the proteolytically cleavable peptide linker will be located within the drug construct between the therapeutic moiety and the carrier moiety. Alternatively, the proteolytically cleavable peptide linker may be located within the carrier moiety such that the molecule that separates away after cleavage comprises the therapeutic moiety and a part of the carrier moiety.

[0247] The polypeptide drug construct comprising the tumor-specific proteolytically cleavable peptide linkers may be a prodrug. Where the tumor-specific cleavable linker is used in a prodrug for delivering a therapeutic moiety to a tumor cell environment, the remainder of the molecule from which the therapeutic moiety separates away after cleavage may comprise a masking moiety, which inhibits the biological activity of the therapeutic moiety in the prodrug such that the therapeutic moiety is biologically active only after cleavage of the proteolytically cleavable peptide linker in the tumor cell environment. The masking moiety may be present in the same polypeptide chain as the therapeutic moiety. Alternatively, the masking moiety may be present in a first polypeptide chain and the therapeutic moiety may be present in a second polypeptide chain. The proteolytically cleavable peptide linker may be present in the first or second polypeptide chain.

[0248] By using a masking moiety, the systemic side effects of an administered protein therapeutic can be reduced by interfering with the binding capability of the therapeutic. By masking the therapeutic using a proteolytically cleavable peptide linker, the binding capability that is interfered with by using the masking moiety can be restored by cleavage of the proteolytically cleavable peptide linker at the tumor microenvironment. Thus, the prodrugs provided herein are engineered to precisely target pharmacological activity to the tumor microenvironment by exploiting one of the hallmarks of cancer, high local concentrations of active protease. This feature of the tumor microenvironment is used to transform a systemically inert molecule into a locally active molecules in the form of a cleavage product. Activation of the therapeutic moiety at the tumor microenvironment significantly reduces systemic toxicities that can be associated with drugs that are administered to a subject in active form.

[0249] In some embodiments, the drug construct provided herein comprises half-life extension moiety. A long half-life in vivo is important for therapeutic proteins. Unfortunately, therapeutics that are administered to a subject can have a short half-life since they are normally cleared rapidly from the subject by mechanisms including clearance by the kidney and endocytic degradation. Thus, in the drug constructs provided herein, a half-life extension moiety may be included for the purpose of extending the half-life of the therapeutic moiety in vivo.

### Proteolytically Cleavable Peptide Linkers

[0250] The proteolytically cleavable peptide linkers described herein comprising a proteolytically cleavable peptide (CP) consisting of the amino acid sequence DLLAVVAAS or ISSGLLSGRS.

[0251] In some embodiments, the proteolytically cleavable peptide linker is from 9 to 25 amino acids in length.

[0252] In some embodiments, the proteolytically cleavable peptide linker is from 10 to 25 amino acids in length.

[0253] In some embodiments, the proteolytically cleavable peptide linker is from 12 to 18 amino acids in length.

[0254] In some embodiments, the proteolytically cleavable peptide linker comprises a proteolytically cleavable peptide (CP) flanked on both sides by a spacer domain (SD1 and SD2) as shown below:

SD1-CP-SD2

[0255] In some embodiments, the proteolytically cleavable peptide (CP) consists of the amino acid sequence DLLAVVAAS.

[0256] In some embodiments, the proteolytically cleavable peptide (CP) consists of the amino acid sequence ISSGLLSGRS.

[0257] A spacer domain may consist of one or more amino acids. The function of the spacer domains, where present, is to link the proteolytically cleavable peptide (CP) to the other functional components in the constructs described herein.

[0258] It will be understood that spacer domains do not alter the biological interaction of the proteolytically cleavable peptide with proteases in the tumor-cell environment or in non-tumor cell environment. In other words, even in the presence of spacer domains the inventive proteolytically cleavable peptides disclosed herein retain their advantageous tumor specificity.

[0259] In some embodiments, the spacer domains flanking the proteolytically cleavable peptide are different.

[0260] In some embodiments, the spacer domains are rich in amino acid residues G, S and P.

[0261] In some embodiments, the spacer domains only includes amino acid residue types selected from the group consisting of G, S and P.

[0262] In some embodiments, the first spacer domain (SD1) is between 3 and 10 amino acids in length. In some embodiments, the first spacer domain (SD1) is between 4 and 9 amino acids in length. In some embodiments, the first spacer domain (SD1) is between 3 and 6 amino acids in length.

[0263] Exemplary SD1 sequences are shown below:

Sequence of SDI
GGPS
GSGPS
GSSGGP
GSP
GSGSPS

[0264] In some embodiments, the first spacer domain (SD1) has a sequence as shown in the table above.

[0265] In some embodiments, the C-terminus sequence of SD2 is −GP C′.

[0266] In some embodiments, the sequence of the C-terminus of SD2 is SEQ ID NO: 29.

[0267] In some embodiments, the second spacer domain (SD2) is between 3 and 6 amino acids in length.

[0268] In some embodiments, SD2 comprises the amino acid sequence SGP.

[0269] In some embodiments, SD2 has the amino acid sequence SGP.

[0270] Exemplary combinations of SD1 and SD2 in a cleavable linker are shown below:

| Linker structure | SD1 sequence | SD2 sequence |
|---|---|---|
| SD1-CP-SD2 | GGPS | SGP |
| SD1-CP-SD2 | GSGPS | SGP |
| SD1-CP-SD2 | GSSGGP | SGP |
| SD1-CP-SD2 | GSP | SGP |
| SD1-CP-SD2 | GSGSPS | SGP |

[0271] In some embodiments, the second spacer domain (SD2) has a sequence as shown in the table above.

[0272] In some embodiments, the proteolytically cleavable linker comprises SD1-CP-SD2 where SD1 is a first S spacer domain, CP is a cleavable peptide having an amino acid sequence DLLAVVAAS, and SD2 is a second spacer domain. In some embodiments, the spacer domains are rich in amino acid residues G, S and P. In some embodiments, the spacer domains only include amino acid residue types selected from the group consisting of G, S and P. In some embodiments, SD2 has the amino acid sequence SGP.

[0273] In some embodiments, the proteolytically cleavable linker comprises SD1-CP-SD2 where SD1 is a first spacer domain, CP is a cleavable peptide having an amino acid sequence ISSGLLSGRS, and SD2 is a second spacer domain. In some embodiments, the spacer domains are rich in amino acid residues G, S and P. In some embodiments, the spacer domains only include amino acid residue types selected from the group consisting of G, S and P. In some embodiments, SD2 has the amino acid sequence SGP.

[0274] Exemplary cleavable linkers using the DLLAVVAAS cleavage peptide are shown below:

Cleavable linker sequence (cleavable
peptide shown in bold)
GGPSDLLAVVAASSGP
GSGPSDLLAVVAASSGP
GSSGGPDLLAVVAASSGP
GSPDLLAVVAASSGP
GSPGDLLAVVAASSGP
GSGSPSDLLAVVAASSGP
SGSDLLAVVAASSGPGSG
SGSPSGDLLAVVAASSGPGSGSP

[0275] In some embodiments, the cleavable linker comprises sequence GGPSDLLAVVAASSGP.

[0276] In some embodiments, the cleavable linker comprises sequence GSGPSDLLAVVAASSGP.

[0277] In some embodiments, the cleavable linker comprises sequence GSSGGPDLLAVVAASSGP.

[0278] In some embodiments, the cleavable linker comprises sequence GSPDLLAVVAASSGP.

[0279] In some embodiments, the cleavable linker comprises sequence GSPGDLLAVVAASSGP.

[0280] In some embodiments, the cleavable linker comprises sequence GSGSPSDLLAVVAASSGP.

[0281] In some embodiments, the cleavable linker has a sequence GGPSDLLAVVAASSGP.

[0282] In some embodiments, the cleavable linker has a sequence GSGPSDLLAVVAASSGP.

[0283] In some embodiments, the cleavable linker has a sequence GSSGGPDLLAVVAASSGP.

[0284] In some embodiments, the cleavable linker has a sequence GSPDLLAVVAASSGP.

[0285] In some embodiments, the cleavable linker has a sequence GSPGDLLAVVAASSGP.

[0286] In some embodiments, the cleavable linker has a sequence GSGSPSDLLAVVAASSGP.

[0287] In some embodiments, the cleavable linker has a sequence SGSDLLAVVAASSGPGSG.

[0288] In some embodiments, the cleavable linker has a sequence SGSPSGDLLAVVAASSGPGSGSP.

[0289] Exemplary cleavable linkers using the ISSGLLSGRS cleavage peptide are shown below:

Cleavable Sinker sequence (cleavable peptide
shown in bold)
GGSSGGSPISSGLLSGRSSGPGSGS
GPPSGSSPISSGLLSGRSSGGG
GGSGGSISSGLLSGRSSGP
GGSGGSGGSISSGLLSGRSSGP

[0290] In some embodiments, the cleavable linker has a sequence GGSSGGSPISSGLLSGRSSGPGSGS.

[0291] In some embodiments, the cleavable linker has a sequence GPPSGSSPISSGLLSGRSSGGG.

[0292] In some embodiments, the cleavable linker has a sequence GGSGGSISSGLLSGRSSGP.

[0293] In some embodiments, the cleavable linker has a sequence GGSGGSGGSISSGLLSGRSSGP.

[0294] Linker combinations disclosed in exemplary AK molecules may be used with any cytokine moiety disclosed herein. Linker combinations disclosed in exemplary AK molecules may be used with any masking moiety disclosed herein disclosed herein. Linker combinations disclosed in exemplary AK molecules may be used with any half-life extension moieties. In other words, the linkers disclosed in exemplary AK molecules may be used in combinations with any cytokine moiety disclosed herein, masking moiety disclosed herein and/or half-life extension moiety disclosed herein.

### Half-Life Extension Moieties

[0295] A long half-life in vivo is important for therapeutic proteins.

[0296] The term “half-life extension moiety” encompasses, for example, PEG, albumin, antibodies and antibody fragments.

[0297] The half-life extension moiety may comprise an antibody or fragment thereof.

[0298] An antibody or fragment thereof that is capable of FcRn-mediated recycling, can be reduce or otherwise delay clearance of the drug construct from a subject, thereby prolonging the half-life of the administered drug construct. In some embodiments, the antibody or fragment thereof is any antibody or fragment thereof that is capable of FcRn-mediated recycling, such as any heavy chain polypeptide or portion thereof (e.g., Fc domain or fragment thereof) that is capable of FcRn-mediated recycling.

[0299] The antibody or fragment thereof can be any antibody or fragment thereof. However, in some embodiments of a drug construct comprising a first half-life extension moiety and a second half-life extension moiety, either the first half-life extension moiety or the second half-life extension moiety may comprise an antibody or fragment thereof that does not bind to the FcRn receptor, such as a light chain polypeptide. For example, in some embodiments of the drug construct, a first half-life extension moiety comprises an antibody or fragment thereof that comprises a light chain polypeptide or portion thereof that does not directly interact with the FcRn receptor, but the drug construct nonetheless has an extended half-life due to comprising a second half-life extension moiety that is capable of interacting with the FcRn receptor, such as by comprising a heavy chain polypeptide. It is recognized in the art that FcRn-mediated recycling requires binding of the FcRn receptor to the Fc region of the antibody or fragment thereof. For instance, studies have shown that residues I253, S254, H435, and Y436 (numbering according to the Kabat EU index numbering system) are important for the interaction between the human Fc region and the human FcRn complex. See, e.g., Firan, M., et al., Int. Immunol. 13 (2001) 993-1002; Shields. R. L., et al, J. Biol. Chem. 276 (2001) 6591-6604). Various mutants of residues 248-259, 301-317, 376-382, and 424-437 (numbering according to the Kabat EU index numbering system) have also been examined and reported. Yeung, Y. A., et al. (J. Immunol. 182 (2009) 7667-7671.

[0300] In some embodiments, the antibody or fragment thereof comprises either a heavy chain polypeptide or a light chain polypeptide. In some embodiments, the antibody or fragment thereof comprises a portion of either a heavy chain polypeptide or a light chain polypeptide. In some embodiments, the antibody or fragment thereof comprises an Fc domain or fragment thereof. In some embodiments, the antibody or fragment thereof comprises a CH2 and CH3 domain or a fragment thereof. In some embodiments, the antibody or fragment thereof comprises the constant domain of the heavy chain polypeptide. In some embodiments, the antibody or fragment thereof comprises the constant domain of the light chain polypeptide. In some embodiments, the antibody or fragment thereof comprises a heavy chain polypeptide or fragment thereof (e.g., an Fc domain or fragment thereof). In some embodiments, the antibody or fragment thereof comprises a light chain polypeptide.

[0301] In some embodiments, the first half-life extension moiety comprises a first Fc domain or a fragment thereof and the second half-life extension moiety comprises a second Fc domain or a fragment thereof.

[0302] In some embodiments, the first and/or second Fc domains each contain one or more modifications that promote the non-covalent association of the first and the second half-life extension moieties. In some embodiments, the first half-life extension moiety comprises an IgG1 Fc domain or fragment thereof including the mutations Y349C; T366S; L38A; and Y407V to form a ‘hole’ in the first half-life extension moiety and the second half-life extension moiety comprises an IgG1 Fc domain or fragment thereof including the mutations S354C and T366W to form the ‘knob’ in the second half-life extension moiety.

[0303] In some embodiments, the first and second half-life extension moieties are each an IgG1, IgG2 or IgG4 Fc domain or fragment thereof. In some embodiments, the first and second half-life extension moieties are each an IgG1 Fc domain or fragment thereof. Human IgG1 Immunoglobulin heavy constant gamma 1 has the sequence:

(SEQ ID NO: 6)
[sequence omitted]

[0304] In some embodiments, the first and second half-life extension moieties am derived from the sequence for human IgG1 Immunoglobulin heavy constant gamma I having SEQ ID NO: 6 (the ‘parent sequence’), such that the first and second half-life extension moieties each comprise SEQ ID NO: 6 or fragment thereof, with one or more amino acid modifications.

[0305] In some embodiments, the first and second half-life extension moieties each comprise the portion of SEQ ID NO: 6 shown in bold above, optionally with one or more amino acid modifications, i.e.:

(SEQ ID NO: 7)
DKTHTCPPCPAPELLGGPSVFLFPPKPKDTLMISRTPEVTCVVVDVSHED
PEVKFNWYVDGVEVHNAKTKPREEQYNSTYRVVSVLTVLHQDWLNGKEYK
CKVSNKALPAPIEKTISKAKGQPREPQVYTLPPSRDELTKNQVSLTCLVK
GFYPSDIAVEWESNGQPENNYKTTPPVLDSDGSFFLYSKLTVDKSRWQQG
NVFSCSVMHEALHNHYTQKSLSLSPG

[0306] In some embodiments, the first and second half-life extension moieties comprise SEQ ID NO: 7 with amino substitutions to promote association of the first and second half-life extension moieties according to the ‘knob into holes’ approach. In some embodiments, the sequence SEQ ID NO: 7 contains mutations Y349C; T366S; L38A; and Y407V (numbered according to the Kabat EU numbering system) to form the ‘hole’ in the first half-life extension moiety and mutations S354C and T366W (numbered according to the Kabat EU numbering system) to form the ‘knob’ in the second half-life extension moiety. These modified sequences have SEQ ID NOs 8 and 11 shown below:

### First Half-Life Extension Moiety (Y349C; T366S; L38A; and Y407V) SEQ ID NO 8

DKTHTCPPCPAPELLGGPSVFLFPPKPKDTLMISRTPEVTCVVVDVSHE
DPEVKFNWYVDGVEVHNAKTKPREEQYNSTYRVVSVLTVLHQDWL
NGKEYKCKVSNKALPAPIEKTISKAKGQPREPQVCTLPPSRDELTKNQ
VSLSCAVKGFYPSDIAVEWESNGQPENNYKTTPPVLDSDGSFFLVSKL
TVDKSRWQQGNVFSCSVMHEALHNHYTQKSLSLSPG

### Second Half-Life Extension Moiety (S354C and T366W) SEQ ID NO 11

DKTHTCPPCPAPELLGGPSVFLFPKPKDTLMISRTPEVTCVVVDVSH
EDPEVKFWYVDGVEVHNKTKPREEQYNSTYRVVSVLTVLHQDW
LVGKEYKCKVSNKALPAPIEKTISKAKGQPREPQVYTLPPCRDELTK
NQVSLWCLVKGFYPSDIAVEWESNGQPENNYKTTPPVLDSDGSFFL
YSKLTVDKSRWQQGNVFSCSVMHEALHNHYTQKSLSLSPG

[0309] In some embodiments, the first and second half-life extension moieties each further comprise amino substitution N297A, numbered according to the Kabat EU numbering system:

### First Half-Lire Extension Moiety (Y349C; T366S; L38A; Y407V and N297A) SEQ ID NO 9

DKTHTCPPCPAPELLGGPSVFLFPPKPKDTLMISRTPEVTCVVVDVSHE
DPEVKFNWYVDGVEVHNAKTKPREEQYASTYRVVSVLTVLHQDWL
NGKEYKCKVSNKALPAPIEKTISKAKGQPREPQVCTLPPSRDELTKNQ
VSLSCAVKGFYPSDIAVEWESNGQPENNYKTTPPVLDSDGSFFLVSKL
TVDKSRWQQGNVFSCSVMHEALHNHYTQKSLSLSPG

### Second Half-Life Extension Moiety (S354C, T366W and N-297A) SEQ ID NO 12

DKTHTCPPCPAPELLGGPSVFLFPPKPKDTLMISRTPEVTCVVVDVSH
EDPEVKFNWYVDGVEVHNAKTKPREEQYASTYRVVSVLTVLHQDW
LNGKEYKCKVSNKALPAPIEKTISKAKGQPREPQVYTLPPCRDELTK
NQVSLWCLVKGFYPSDIAVEWESNGQPENNYKTTPPVLDSDGSFFL
YSKLTVDKSRWQQGNVFSCSVMHEALHNHYTQKSLSLSPG

[0312] In some embodiments, the first and second half-life extension moieties each further comprise the amino substitution I253A, numbered according to the Kabat EU numbering system.

[0313] In some embodiments, the first and second half-life extension moieties each further comprise both the amino substitutions N297A and I253A, numbered according to the Kabat EU numbering system:

### First Half-Life Extension Moiety (Y349C; T366S; L38A; Y407V, N297A and I253A) SEQ ID NO 10

DKTHTCPPCPAPELLGGPSVFLFPPKPKDTLMASRTPEVTCVVVDVSHED
PEVKFNWYVDGVEVHNAKTKPREEQYASTYRVVSVLTVLHQDWLNGKE
YKCKVSNKALPAPIEKTISKAKGQPREPQVCTLPPSRDELTKNQVSLSCA
VKGFYPSDIAVEWESNGQPENNYKTTPPVLDSDGSFFLVSKLTVDKSRW
QQGNVFSCSVMHEALHNHYTQKSLSLSPG

### Second Half-Life Extension Moiety (S354C, T366W, N297A and I253A) SEQ ID NO 13

DKTHTCPPCPAPELLGGPSVFLFPPKPKDTLMASRTPEVTCVVVDVSHED
PEVKFNWYVDGVEVHNAKTKPREEQYASTYRVVSVLTVLHQDWLNGKEY
KCKVSNKALPAPIEKTISKAKGQPREPQVYTLPPCRDELTKNQVSLWCLV
KGFYPSDIAVEWESNGQPENNYKTTPPVLDSDGSFFLYSKLTVDKSRW
QQGNVFSCSVMHEALHNHYTQKSLSLSPG

[0316] In some embodiments, the first half-life extension moiety comprises an amino acid sequence having about or at least about 85%, 86%, 87%, 88%, 89%, 90%, 91%, 92%, 93%, 94%, 95%, 96%, 97%, 98%, or 99% sequence identity to any one of the amino acid sequence of any one of SEQ ID NOs: 7, 8, 9 and 10.

[0317] In some embodiments, the second half-life extension moiety comprises an amino acid sequence having about or at least about 85%, 86%, 87%, 88%, 89%, 90%, 91%, 92%, 93%, 94%, 95%, 96%, 97%, 98%, or 99% sequence identity to any one of the amino acid sequence of any one of SEQ ID NOs: 7, 11, 12 and 13.

[0318] In some embodiments, the first half-life extension moiety comprises an amino acid sequence having one or more modifications, such as one or more amino acid substitutions, additions, or deletions, as compared to the amino acid sequence of any one of SEQ ID NOs: 7, 8, 9 and 10. In some embodiments, the second half-life extension moiety comprises an amino acid sequence having one or more modifications, such as one or more amino acid substitutions, additions, or deletions, as compared to the amino acid sequence of any one of SEQ ID NOs: 7, 11, 12 and 13. The one or more modifications can be any modifications or alterations described herein, including, in some embodiments, any modifications or alterations disclosed herein that promote heterodimerization of polypeptide chains and/or suppresses homodimerization of polypeptide chains, alter effector function, or enhance effector function.

[0319] In some embodiments, the Fc domain or fragment thereof comprises one or more amino acid substitutions altering effector function. In some embodiments, the half-life extension moiety is an IgG1 Fc domain or fragment thereof and comprises one or more amino acid substitutions selected from the group consisting of N297A, N297G, N297Q, L234A, L235A, C220S, C226S, C229S, P238S, E233P, L234V, L234F, L235E, P331 S, S267E, L328F, D265A, and P329G, numbered according to the Kabat EU numbering system. In some embodiments, the half-life extension moiety is an IgG2 Fc domain or fragment thereof and comprises the amino substitution(s): V234A and G237A; H268Q, V309L, A330S, and A331S; and/or V234A, G237A, P238S, H268A, V309L, and A330S, numbered according to the Kabat EU numbering system. In some embodiments, the half-life extension moiety is an IgG2 Fc domain or fragment thereof and comprises one or more amino acid substitutions selected from the group consisting of V234A, G237A, H268Q, V309L, A330S, A331S, P238S, H268A, and V309L, numbered according to the Kabat EU numbering system. In some embodiments, the half-life extension moiety is an IgG4 Fc domain or fragment thereof and comprises the amino substitution(s): L235A, G237A, and F318A; S228P, L234A, and L235A; H268Q, V309L, A330S, and P331S; and/or S228P and L235A, numbered according to the Kabat EU numbering system. In some embodiments, the half-life extension moiety is an IgG2 Fc domain or fragment thereof and comprises one or more amino acid substitutions selected from the group consisting of L235A, G237A, E318A, S228P, L234A, H268Q, V309L, A330S, and P331S, numbered according to the Kabat EU numbering system.

[0320] In some embodiments, the half-life extension moiety comprises Fc domain or fragment thereof that comprises one or more amino acid substitutions enhancing effector function. In some embodiments, the half-life extension moiety is an IgG1 Fc domain or fragment thereof and comprises the amino acid substitution(s); S298A, E333A, and K334A; S239D and I332E; S239D, A330L, and I332E; P247I and A339D or A339Q; D280H and K290S; D280H, K290S, and either S298D or S298V; F243L, R292P, and Y300L; F243L, R292P, Y300L, and P396L; F243L, R292P, Y300L, V305I, and P396L; G236A, S239D, and I332E; K326A and E333A; K326W and E333S; K290E, S298G, and T299A; K290E, S298G, T299A, and K326E; K290N, S298G, and T299A; K290N, S298G, T299A, and K326E; K334V; 1235S, S239D, and K334V; K334V and Q331M, S239D, F243V, E294L, or S298T; E233L, Q311M, and K334V; L234I, Q311M, and K334V; K334V and S298T, A330M, or A330F; K334V, Q311M, and either A330M or A330F; K334V, S298T, and either A330M or A330F; K334V, S239D, and either A330M or S298T; L234Y, Y296W, and K290Y, F243V, or E294L; Y296W and either L234Y or K290Y; S239D, A330S, and I332E, V264I; F243L and V264I; L328M I332E; L328M and I332E; V264I and I332E; S239E and I332E; S239Q and I332E; S239E; A330Y; T32; L328I and I332E; L328Q and I332E; V264T; V240I; V266I; S239D; S239D and I332D; S239D and I332N; S239D and I332Q; S239E and 332D; S239E and I332N; S239E and I332Q; S239N and I332D; S239N and I332E; S239Q and I332D; A330Y and T332E; V264I, A330Y, and I332E; A330L and I332E; V264I, A330L, and I332E; L234E, L234Y, or L234I; L235D, L235S, L235Y, or L2351; S239T; V240M; V264Y; A330I; N325T; I332E and L328D, L328V, L328T, or L328I; V264I, I332E, and either S239E or S239Q; S239E, V264I, A330Y, and I332E; A330Y, I332E, and cither S239D or S239N; A330L, I332E, and either S239D or S239N; V264I, S298A, and I332E; S298A, I332E, and either S239D or S239N; S239D, V264I, and I332E; S239D, V264I, S298A, and I332E; S239D, V264I, A330L, and I332E; S239D, I332E, and A330I; P230A; P230A, E233D, and I332E; E272Y; K274T, K274E, K274R, K274L, or K274Y; F275W; N276L; Y278T; V302I; E318R; S324D, S324I or S324V; K326I or K326T; T335D, T335R, or T335Y; V240I and V266I; S239D, A330Y, I332E, and L234I; S239D, A330Y, I332E, and L235D; S239D, A330Y, I332E, and V240I; S239D, A330Y, I332E, and V264T; and/or S239D, A330Y, I332E, and either K326E or K326T, numbered according to the Kabat EU numbering system. In some embodiments, the half-life extension moiety is an IgG1 Fc domain or fragment thereof and comprises one or more amino acid substitution(s) selected from the group consisting of: P230A, E233D. L234E, L234Y, L234I, L235D, L235S, L235Y, L2351, S239D, S239E, S239N, S239Q, S239T, V240I, V240M, F243L, V264I, V264T, V264Y, V266I. E272Y, K274T, K274E, K274R, K274L, K274Y, F275W, N276L, Y278T, V302I, E318R, S324D, S324I, S324V, N325T, K326I, K326T, L328M, L328I, L328Q, L328D, L328V, L328T, A330Y, A330L, A330I, I332D, I332E, I332N, I332Q, T335D, T335R, and T335Y.

[0321] In some embodiments, the half-life extension moiety comprises one or more amino acid substitution(s) that enhance binding of the half-life extension moiety to FcRn. In some embodiments, the one or more amino acid substitution(s) increase binding affinity of an Fc-containing polypeptide (e.g., a heavy chain polypeptide or an Fc domain or fragment thereof) to FcRn at acidic pH. In some embodiments, the half-life extension moiety comprises one or more amino acid substitution(s) selected from the group consisting of M428F; T250Q and M428F; M252Y, S254T, and T256E; P257I and N434H; D376V and N434H; P257I and Q311I; N434A; N434W; M428F and N434S; V259I and V308F; M252Y, S254T, and T256E; V259I, V308F and M428F; T307Q and N434A; T307Q and N434S; T307Q. E380A, and N434A; V308P and N434A; N434H; and V308P.

[0322] For manufacturing purposes, a signal peptide may be engineered upstream of the half life domain to improve secretion of the protein. The signal peptide is selected according to the cell line's requirements as is known in the art. It will be understood that the signal peptide is not expressed as part of the protein that will be purified and formulated as drug product.

[0323] 1.1.1 Heterodimerization Modifications

[0324] The half-life extension moieties described herein may include one or more modifications that promote heterodimerization of two different half-life extension moieties. In some embodiments, it is desirable to promote heterodimerization of the first and second half-life extension moieties such that production of the drug construct in its correct heterodimeric form is produced efficiently. As such, one or more amino acid modifications can be made to the first half-life extension moiety and one or more amino acid modifications can be made to the second half-life extension moiety using any strategy available in the art, including any strategy as described in Klein et al. (2012), MAbs, 4(6): 653-663. Exemplary strategies and modifications are described in detail below.

[0325] 1.1.2 Knobs-into-Holes Approach

[0326] One strategy for promoting heterodimerization of two different half-life extension moieties is an approach termed the “knobs-into-holes”.

[0327] In some embodiments, the drug construct comprises a first half-life extension moiety and a second half-life extension moiety, each of which comprises a CH3 domain. In some embodiments, the half-life extension moiety comprising a CH3 domain is a heavy chain polypeptide or a fragment thereof (e.g., an Fc domain or fragment thereof). The CH3 domains of the two half-life extension moieties can be altered by the “knobs-into-holes” technology, which is described in detail with several examples in, e.g., WO 1996/027011; Ridgway, J. B. et al, Protein Eng. (1996) 9(7): 617-621; Merchant, A. M., et al, Nat. Biotechnol. (1998) 16(7): 677-681. See also Klein et al. (2012), MAbs, 4(6): 653-663. Using the knob-into-holes method, the interaction surfaces of the two CH3 domains are altered to increase the heterodimerization of the two half-life extension moieties containing the two altered CH3 domains. This occurs by introducing a bulky residue into the CH3 domain of one of the half-life extension moieties, which acts as the “knob.” Then, in order to accommodate the bulky residue, a “hole” is formed in the other half-life extension moiety that can accommodate the knob. Either of the altered CH3 domains can be the “knob” while the other can be the “hole.” The introduction of a disulfide bridge further stabilizes the heterodimers (Merchant, A. M., et al, Nat. Biotechnol. (1998) 16(7); Atwell. S., et al. J. Mol. Biol. (1997) 270(1): 26-35) as well as increases yield.

[0328] It has been reported that heterodimerization yields above 97% can be achieved by introducing the S354C and T366W mutations in a heavy chain to create the “knob” and by introducing the Y349C, T366S, L368A, and Y407V mutations in a heavy chain to create the “hole” (numbering of the residues according to the Kabat EU numbering system). Caner et al. (2001), J. Immunol. Methods, 248: 7-15; Klein et al. (2012). MAbs, 4(6): 653-663.

[0329] In some embodiments comprising a first half-life extension moiety and a second half-life extension moiety, the first half-life extension moiety comprises a heavy chain polypeptide or portion thereof (e.g., an Fc domain or fragment thereof) that comprises the amino acid mutations S354C and T366W (numbered according to the Kabat EU numbering system), and the second half-life extension moiety comprises a heavy chain polypeptide or portion thereof (e.g., an Fc domain or fragment thereof) that comprises the amino acid mutations Y349C, T366S, L368A, and Y407V (numbered according to the Kabat EU numbering system).

[0330] In some embodiments comprising a first half-life extension moiety and a second half-life extension moiety, the first half-life extension moiety comprises a heavy chain polypeptide or portion thereof (e.g., an Fc domain or fragment thereof) that comprises the amino acid mutations Y349C, T366S, L368A, and Y407V (numbered according to the Kabat EU numbering system), and the second half-life extension moiety comprises a heavy chain polypeptide or portion thereof (e.g., an Fc domain or fragment thereof) that comprises the amino acid mutations S354C and T366W (numbered according to the Kabat EU numbering system).

[0331] Additional examples of substitutions that can be made to form knobs and holes include those described in US20140302037A1, the contents of which are herein incorporated by reference. For example, in some embodiments, any of the following amino acid substitutions can be made to a first half-life extension moiety (“first domain”) and a paired second half-life extension moiety (“second domain”) that each contain an Fc domain: (a) Y407T in the first domain and T366Y in the second domain; (b) Y407A in the first domain and T366W in the second domain; (c) F405A in the first domain and T394W in the second domain; (d) F405W in the first domain and T394S in the second domain; (c) Y407T in the first domain and T366Y in the second domain; (f) T366Y and F405A in the first domain and T394W and Y407T in the second domain: (g) T366W and F405W in the first domain and T394S and Y407A in the second domain; (h) F405W and Y407A in the first domain and T366W and T394S in the second domain: or (i) T366W in the first domain and T366S. L368A, and Y407V in the second domain, numbered according to the Kabat EU numbering system.

[0332] In some embodiments, any of the following amino acid substitutions can be made to a first half-life extension moiety (“first domain”) and a paired second half-life extension moiety (“second domain”) that each contain an Fc domain: (a) Y407T in the second domain and T366Y in the first domain; (b) Y407A in the second domain and T366W in the first domain; (c) F405A in the second domain and T394W in the first domain; (d) F405W in the second domain and T394S in the first domain; (e) Y407T in the second domain and T366Y in the first domain; (f) T366Y and F405A in the second domain and T394W and Y407T in the first domain: (g) T366W and F405W in the second domain and T394S and Y407A in the first domain; (h) F405W and Y407A in the second domain and T366W and T394S in the first domain; or (i) T366W in the second domain and T366S, L368A, and Y407V in the first domain, numbered according to the Kabat EU numbering system.

[0333] In embodiments comprising a first half-life extension moiety and a second half-life extension moiety that each comprise an Fc domain, any of the heterodimerizing alterations described herein can be used in the Fc domains to promote heterodimerization of any of the drug constructs described herein.

### Therapeutic Moieties

[0334] Provided herein, in some embodiments, is a cytokine prodrug where the therapeutic moiety is a cytokine moiety. The masking moiety in the cytokine prodrug may comprise a domain of the extracellular domain of the cytokine receptor. The cytokine prodrug thus may be considered to be a masked cytokine.

[0335] The cytokine moiety may comprise a wild-type cytokine moiety or variant cytokine moiety.

[0336] Cytokines exemplified herein are IL-2. IL-12 and IL-15.

### Cytokine Prodrugs

[0337] Cytokines play a role in cellular signalling, particularly in cells of the immune system. Provided herein is a cytokine moiety comprising a cytokine (e.g. IL-2, IL-15 or IL-12 cytokine) or functional fragment thereof for use in a masked cytokine or cleavage product thereof.

[0338] 1.1 ‘Heteromdimeric’ Masked Cytokines

[0339] Provided herein, in some embodiments, is a masked cytokine comprising a masking moiety in a first polypeptide chain and a cytokine moiety thereof in a second polypeptide chain. Such masked cytokines may be referred to as ‘heterodimeric’ masked cytokines.

[0340] In some embodiments, the masked cytokine comprises a protein heterodimer comprising:
[0341] c) a first polypeptide chain comprising a masking moiety linked to a first half-life extension moiety via a first linker; and
[0342] d) a second polypeptide chain comprising a cytokine moiety thereof linked to a second half-life extension moiety via a second linker,
   wherein the first half-life extension moiety is associated with the second half-life extension moiety, and
   wherein at least the first linker or the second linker is a proteolytically cleavable peptide linker comprising a proteolytically cleavable peptide (CP) consisting of the amino acid sequence DLLAVVAAS or ISSGLLSGRS.

[0343] In some embodiments, the first linker is a proteolytically cleavable peptide linker comprising a proteolytically cleavable peptide (CP) consisting of the amino acid sequence DLLAVVAAS or ISSGLLSGRS. The proteolytically cleavable peptide linker may be as described anywhere herein. In some embodiments, the first linker is a proteolytically cleavable peptide linker comprising a proteolytically cleavable peptide (CP) consisting of the amino acid sequence DLLAVVAAS. In some embodiments, the first linker is a proteolytically cleavable peptide linker comprising a proteolytically cleavable peptide (CP) consisting of the amino acid sequence ISSGLLSGRS. In some embodiments, the first linker is a proteolytically cleavable peptide linker and the second linker is a non-cleavable linker, non-cleavable linker may be as described anywhere herein.

[0344] In some embodiments, the second linker is a proteolytically cleavable peptide linker comprising a proteolytically cleavable peptide (CP) consisting of the amino acid sequence DLLAVVAAS or ISSGLLSGRS. The proteolytically cleavable peptide linker may be as described anywhere herein. In some embodiments, the second linker is a proteolytically cleavable peptide linker comprising a proteolytically cleavable peptide (CP) consisting of the amino acid sequence DLLAVVAAS. In some embodiments, the second linker is a proteolytically cleavable peptide linker comprising a proteolytically cleavable peptide (CP) consisting of the amino acid sequence ISSGLLSGRS. In some embodiments, the second linker is a proteolytically cleavable peptide linker and the first linker is non-cleavable. The non-cleavable linker may be as described anywhere herein.

[0345] The proteolytically cleavable peptide linker may be as described anywhere herein.

[0346] The half-life extension moieties may be as described anywhere herein.

[0347] The combination of masking moiety and cytokine moiety may be as described anywhere herein.

[0348] In some embodiments, in the first polypeptide chain, the first half life extension domain is linked to the amino terminus of the first linker and the carboxy terminus of the first linker is linked to the amino terminus of the masking moiety and, in the second polypeptide chain, the second half life extension domain is linked to the amino terminus of the second linker and the carboxy terminus of the second linker is linked to the amino terminus of the cytokine moiety thereof.

[0349] In some embodiments, the first polypeptide chain comprises:

N′HL1-L1-MM C′

and the second polypeptide chain comprises:

N′HL2-L2-C C′

where HL1 is the first half life extension domain. L1 is the first linker, MM is the masking moiety, HL2 is the second half life extension domain, L2 is the second linker, and C is the cytokine moiety thereof.

[0350] In some embodiments, the second linker is the proteolytically cleavable linker and the first linker is a non-cleavable linker. This arrangement is described herein as ‘Structure A’. In some embodiments, the first polypeptide chain comprises:

N′HL1-non-cleavable L1-MM C′

and the second polypeptide chain comprises:

N′HL2-cleavable L2-C C′

[0351] In some embodiments, the first linker is the proteolytically cleavable linker and the second is a non-cleavable linker. This arrangement is described herein as ‘Structure B’. In some embodiments, the first polypeptide chain comprises:

N′HL1-cleavable L1-MM C′

and the second polypeptide chain comprises:

N′HL2-non-cleavable L2-C C′

[0352] 1.2 ‘Linear’ Masked Cytokines

[0353] Provided herein. In some embodiments, is a masked cytokine comprising a masking moiety and a cytokine moiety thereof linked in a single polypeptide chain. In some embodiments, the masked cytokine comprises a polypeptide chain comprising formula:

N′HL-L2-C-L1-MM C′

where HL is the half life extension domain, L1 is the first linker, MM is the masking moiety, L2 is the second linker, and C is the cytokine moiety thereof, wherein at least the first linker comprises a proteolytically cleavable peptide.

[0354] In some embodiments, the masked cytokine comprises a polypeptide chain comprising formula:

N′HL-L2-MM-L1-C C′

where HL is the half life extension domain, L1 is the first linker, MM is the masking moiety, L2 is the second linker, and C is the cytokine moiety thereof, wherein at least the first linker comprises a proteolytically cleavable peptide. In some embodiments, the first linker is a cleavable linker as described anywhere herein. In some embodiments, the second linker is a non-cleavable linker as described anywhere herein. In some embodiments, the cytokine moiety thereof is as described anywhere herein. In some embodiments, the half life extension domain (HL) comprises an Fc region of an antibody (i.e. the C-terminal region of an immunoglobulin heavy chain) or a fragment thereof comprising dimerized Fc domains (HL1-HL2). Although the boundaries of the Fc region of an immunoglobulin heavy chain might vary, the human IgG heavy-chain Fc region is usually defined to stretch from an amino acid residue at position Cys226, or from Pro230, to the carboxyl-terminus thereof. In some embodiments, the dimerized Fc domains of an antibody (HL1-HL2) comprises a first half life extension domain and a second half life extension domain as described anywhere herein, where the first half-life extension moiety comprises a first Fc domain or a fragment thereof and the second half-life extension moiety comprises a second Fc domain or a fragment thereof. In some embodiments, HL2 is a component of the polypeptide chain and HL1 is dimerized to HL2.

[0355] 1.1 Cytokine Moieties and Masking Moeities

[0356] The cytokine moieties and masking moieties (e.g. IL-2, IL-12, and IL-15 cytokine moieties and masking moieties) disclosed herein may be used in any polypeptide drug construct disclosed herein.

[0357] The cytokine moieties and masking moieties disclosed herein may be used in a heterodimeric masked cytokine of Structure A as disclosed herein.

[0358] The cytokine moieties and masking moieties disclosed herein may be used in a heterodimeric masked cytokine of Structure B as disclosed herein.

[0359] The cytokine moieties and masking moieties disclosed herein may be used in a linear masked cytokine as disclosed herein.

[0360] 1.1.1 IL-2 Cytokine Moieties and IL-2 Masking Moieties

### (a) IL-2 Cytokine Moieties

[0361] In some embodiments, the therapeutic moiety comprises an IL-2 cytokine or functional fragment thereof.

[0362] IL-2 is an interleukin, which is a type of cytokine signalling molecule in the immune system that regulates activities of white blood cells.

[0363] In eukaryotic cells, naturally occurring IL-2 is synthesized as a precursor polypeptide of 153 amino acids, which has SEQ ID NO: 1. This is then processed into mature IL-2 by the removal of amino acid residues 1-20. This results in a mature form of IL-2 consisting of 133 amino acids (amino acid residues 21-153), which has SEQ ID NO: 2. “Functional fragments” of an IL-2 cytokine comprise a portion of a full length cytokine protein which retains or has modified cytokine receptor binding capability (e.g., within at least 50%, 80%, 90%, 95%, 96%, 97%, 98%, 99% or 100% activity compared to the full length cytokine protein).

[0364] Cytokine receptor binding capability can be shown, for example, by the capability of a cytokine to bind to the cytokine's cognate receptor or a component thereof (e.g., one or more chain(s) of a heterotrimeric receptor complex).

[0365] In some embodiments, the IL-2 cytokine or functional fragment thereof is any naturally occurring interleukin-2 (IL-2) protein or modified variant thereof capable of binding to an interleukin-2 receptor, particularly the IL-2Rα chain. In the context of IL-2 cytokine binding, the target protein could be IL-2R (comprising the IL-2Rα, IL-2Rβ, and IL-2Rγ chains), the IL-2Rα chain, the IL-2Rβ chain, or the IL-2Rα/β dimeric complex. In some embodiments, the IL-2 cytokine or functional fragment thereof comprises the amino acid sequence of amino acid residues 21-153 of SEQ ID NO: 1. In some embodiments, the IL-2 polypeptide or functional fragment thereof comprises the amino acid sequence of mature IL-2, SEQ ID NO: 2.

[0366] In some embodiments, the IL-2 cytokine or functional fragment thereof comprises an amino acid sequence having at least one amino acid modification as compared to the amino acid sequence of SEQ ID NO: 2. Each of the at least one amino acid modifications can be any amino acid modification, such as a substitution, insertion, or deletion. In some embodiments, the IL-2 cytokine or functional fragment thereof comprises an amino acid sequence having at least 1, at least 2, at least 3, at least 4, at least 5, at least 6, at least 7, at least 8, at least 9, or at least 10 amino acid substitutions as compared to the amino acid sequence of SEQ ID NO: 2. In some embodiments, the IL-2 cytokine or functional fragment thereof comprises an amino acid sequence having at least 5 amino acid substitutions as compared to the amino acid sequence of SEQ ID NO: 2.

[0367] In some embodiments, the IL-2 cytokine or functional fragment thereof comprises an amino acid sequence having one or more amino acid substitutions as compared to the amino acid sequence of wild-type IL-2 of SEQ ID NO: 2 that reduces the affinity of the IL-2 peptide or functional fragment thereof for IL-2Rα (CD25). In some embodiments, the IL-2 cytokine or functional fragment thereof comprises an amino acid sequence having one or more amino acid substitutions as compared to the amino acid sequence of SEQ ID NOs: 2, such that one or more of amino acid residues 38, 42, 45, and 62 is an alanine (A). In some embodiments, the IL-2 cytokine or functional fragment thereof comprises an amino acid sequence having one or more amino acid substitutions as compared to the amino acid sequence of SEQ ID NO: 2, such that amino acid residues 38, 42, 45, and 62 are an alanine (A).

[0368] In some embodiments, the IL-2 cytokine or functional fragment thereof comprises amino acid sequence substitution C125A as compared to the amino acid sequence of SEQ ID NOs: 2.

[0369] In some embodiments, the IL-2 cytokine or functional fragment thereof comprises an amino acid sequence having one or more amino acid substitutions as compared to the amino acid sequence of SEQ ID NO: 2, such that amino acid residues 38, 42, 45, and 62 are an alanine (A) and amino acid residue 125 is a alanine (A). In some embodiments, the IL-2 cytokine or functional fragment thereof comprises an amino acid sequence having amino acid residues R38, F42, Y45, and E62 substituted for alanine in the amino acid sequence of SEQ ID NO: 2. In some embodiments, the IL-2 cytokine or functional fragment thereof comprises an amino acid sequence having amino acid residues R38, F42, Y45, and E62 substituted for alanine (A) and amino acid residue C125 substituted for alanine (A) in the amino acid sequence of SEQ ID NO: 2.

[0370] In some embodiments, the IL-2 cytokine or functional fragment thereof comprises the amino acid sequence of SEQ ID NO: 3. In some embodiments, the IL-2 cytokine or functional fragment thereof comprises an amino acid sequence having about or at least about 85%, 86%, 87%, 88%, 89%, 90%, 91%, 92%, 93%, 94%, 95%, 96%, 97%, 98%, or 99% sequence identity to the amino acid sequence of SEQ ID NO: 3.

[0371] In some embodiments, the IL-2 cytokine or functional fragment thereof has one or more amino acid residues e.g. residues 1-3 s removed as compared to the amino acid sequence of the mature IL-2 of SEQ ID 2, for the purpose of removing an O-glycosylation site. In some embodiments, the IL-2 cytokine or functional fragment thereof has one or more amino acid residues substituted as compared to the amino acid sequence of the mature IL-2 of SEQ ID 2, for the purpose of removing an O-glycosylation site. In some embodiments, the IL-2 cytokine or functional fragment thereof has one or more amino acid residues inserted, e.g. in the region of residues 1-3, as compared to the amino acid sequence of the mature IL-2 of SEQ ID 2, for the purpose of removing an O-glycosylation site. In some embodiments, the IL-2 cytokine or functional fragment thereof does not have an O-glycosylation site within residues 1-3.

### (b) IL-2 Masking Moieties

[0372] Provided herein is a masking moiety for use in masking a therapeutic moiety comprising an IL-2 cytokine or functional fragment thereof.

[0373] It will be understood that the masking moiety is cleaved from the masked cytokine to form the cleavage product thereof. The masking moiety masks the IL-2 cytokine or functional fragment thereof in the masked cytokine thereby reducing or preventing binding of the IL-cytokine or functional fragment thereof to its cognate receptor. In some embodiments, the masking moiety reduces or prevents binding of the IL-2 cytokine or functional fragment thereof to IL-2Rα (CD25). In some embodiments, the masking moiety as provided herein refers to a moiety capable of binding to, or otherwise exhibiting an affinity for the IL-2 cytokine or functional fragment thereof, such as an anti-IL-2 antibody or IL-2 cognate receptor protein. Methods for determining the extent of binding of a protein (e.g., cytokine) to a cognate protein (e.g., cytokine receptor) are well known in the art.

[0374] In some embodiments, the masking moiety comprises an IL-2 cytokine receptor, or a subunit or functional fragment thereof.

[0375] In some embodiments, the masking moiety comprises IL-2Rβ (also referred to as CD122) or a fragment, portion, or variant thereof that retains or otherwise demonstrates an affinity to IL-2.

[0376] In some embodiments, the masking moiety comprises the amino acid sequence of SEQ ID NO: 4. In some embodiments, the masking moiety comprises an amino acid sequence having about or at least about 85%, 86%, 87%, 88%, 89%, 90%, 91%, 92%, 93%, 94%, 95%, 96%, 97%, 98%, or 99% sequence identity to the amino acid sequence of SEQ ID NO: 4. In some embodiments, the masking moiety comprises an amino acid sequence having the amino acid sequence of SEQ ID NO: 4 with one to four amino acid substitutions. In some embodiments, the masking moiety comprises an amino acid sequence having the amino acid sequence of SEQ ID NO: 4 with one or two amino acid substitutions.

[0377] In some embodiments, the IL-2Rβ or a fragment, portion or variant thereof has mutation at amino acid position C122 as compared to IL-2Rβ of SEQ ID NO: 4.

[0378] In some embodiments, the IL-2Rβ or a fragment, portion or variant thereof has mutation C122S at amino acid position 122 as compared to IL-2Rβ of SEQ ID NO: 4.

[0379] In some embodiments, the masking moiety comprises an amino acid sequence of SEQ ID NO: 4 with a C122 mutation.

[0380] In some embodiments, the masking moiety comprises an amino acid sequence of SEQ ID NO: 4 with a C122S mutation.

[0381] In some embodiments, the IL-2Rβ or a fragment, portion or variant thereof has mutation at amino acid position C168 as compared to IL-2Rβ of SEQ ID NO: 4.

[0382] In some embodiments, the IL-2Rβ or a fragment, portion or variant thereof has mutation C168S at amino acid position 168 as compared to IL-2Rβ of SEQ ID NO: 4.

[0383] In some embodiments, the masking moiety comprises an amino acid sequence of SEQ ID NO: 4 with a C168 mutation.

[0384] In some embodiments, the masking moiety comprises an amino acid sequence of SEQ ID NO: 4 with a C168S mutation.

[0385] In some embodiments, the IL-2Rβ or a fragment, portion or variant thereof has mutation at amino acid positions C122 and C168 as compared to IL-2Rβ of SEQ ID NO: 4.

[0386] In some embodiments, the IL-2Rβ i or a fragment, portion or variant thereof has mutation C122S and C168S as compared to IL-2Rβ of SEQ ID NO: 4.

[0387] In some embodiments, the masking moiety comprises an amino acid sequence of SEQ ID NO: 5.

[0388] In some embodiments, when (i) the masked cytokine is a Structure A heterodimeric masked cytokine and (ii) the cytokine moiety is an IL-2 cytokine moiety, then the proteolytically cleavable peptide linker does not have the amino acid sequence GGSGTSSGLLSGRSSSGP or GISSGLLSGRSSSGP.

[0389] 1.1.2 IL-12 Cytokine Moieties and IL-12 Masking Moieties

### (a) IL-12 Cytokine Moieties

[0390] In some embodiments, the therapeutic moiety comprises an IL-12 cytokine or functional fragment thereof.

[0391] IL-12 is an interleukin, which is a type of cytokine signalling molecule in the immune system that regulates activities of white blood cells.

[0392] Endogenous IL-12 exists as two distinct molecules IL-12 p40 and IL-12p35, that dimerize in the cell during biosynthesis.

[0393] The full sequences of IL-12 p40 and IL-12p35 are (pro-peptides cleaved off during biosynthesis are shown) in bold):

IL-12 p40 subunit:
MCHQQLVISWFSLVFLASPLVAIWELKKDVYVVELDWYPDAPGEMWLTC
DTPEEDGITVVTLDQSSEVLGSGKTLTIQVKEFGDAGQYTCHKGGEVLS
HSLLLLHKKEDGIWSTDILKDQKEPKNKTFLRCEAKNYSGRFTCWWLTT
ISTDLTFSVKSSRGSSDPQGVTCGAATLSAERVRGDNKEYEYSVECQED
SACPAAEESLPIEVMVDAVHKLKYENYTSSFFIRDIIKPDPPKNLQLKP
LKNSRQVEVSWEYPDTWSTPHSYFSLTFCVQVQGKSKREKKDRVFTDKT
SATVICRKNASISVRAQDRYYSSSWSEWASVPCS
IL-12 p35 subunit:
MCPARSLLLVATLVLLDHLSLARNLPVATPDPGMFPCLHHSQNLLRAVS
NMLQKARQTLEFYPCTSEEIDHEDITKDKTSTVEACLPLELTKNESCLN
SRETSFITNGSCLASRKTSFMMALCLSSIYEDLKMYQVEFKTMNAKLLM
DPKRQIFLDQNMLAVIDELMQALNFNSETVPQKSSLEEPDFYKTKIKLC
ILLHAFRIRAVTIDRVMSYLNAS

[0394] The mature forms are as follows:

IL-12 p40 subunit:
IWELKKDVYVVELDWYPDAPGEMVVLTCDTPEEDGITWTLDQSSEVLGS
GKTLTIQVKEFGDAGQYTCHKGGEVLSHSLLLLHKKEDGIWSTDILKDQ
KEPKNKTFLRCEAKNYSGRFTCWWLTTISTDLTFSVKSSRGSSDPQGVT
CGAATLSAERVRGDNKEYEYSVECQEDSACPAAEESLPIEVMVDAVHKL
KYENYTSSFFIRDIIKPDPPKNLQLKPLKNSRQVEVSWEYPDTWSTPHS
YFSLTFCVQVQGKSKREKKDRVFTDKTSATVICRKNASISVRAQDRYYS
SSWSEWASVPCS
IL-12 p35 subunit:
RNLPVATPDPGMFPCLHHSQNLLRAVSNMLQKARQTLEFYPCTSEEIDH
EDITKDKTSTVEACLPLELTKNESCLNSRETSFITNGSCLASRKTSFMM
ALCLSSIYEDLKMYQVEFKTMNAKLLMDPKRQIFLDQNMLAVIDELMQA
LNFNSETVPQKSSLEEPDFYKTKIKLCILLHAFRIRAVT1DRVMSYLNA
S

[0395] They are expressed as two chains that covalently dimerize during biosynthesis through a disulfide bound between the two subunits: Cysteine C199 of the p40 subunit associates with Cysteine C96 of the p35 subunit.

[0396] “Functional fragments” of an IL-12 cytokine comprise a portion of a full length cytokine protein which retains or has modified cytokine receptor binding capability (e.g., within at least 50%, 80%, 90%, 95%, 96%, 97%, 98%, 99% or 100% activity compared to the full length cytokine protein). Cytokine receptor binding capability can be shown, for example, by the capability of a cytokine to bind to the cytokine's cognate receptor or a component thereof.

[0397] In some embodiments, the IL-12 cytokine or functional fragment thereof is any naturally occurring interleukin-2 (IL-12) protein or modified variant thereof capable of binding to an interleukin-12 receptor.

[0398] In some embodiments, the IL-12 polypeptide or functional fragment thereof comprises an IL-12p40 polypeptide or functional fragment thereof covalently linked to an IL-12p35 polypeptide or functional fragment thereof.

[0399] The IL-12p40 polypeptide or functional fragment thereof may be attached to the first half life extension domain such that the first polypeptide chain comprises formula:

N′HL1-L1-MM C′

and the second polypeptide chain comprises formula:

N′HL2-L2-[IL-12p401-linker-IL-12p35]C′

where ‘IL-12p40’ is the IL-12p40 polypeptide or functional fragment thereof and ‘IL-12p35’ is the IL-12p35 polypeptide or functional fragment thereof.

[0400] In some embodiments, the IL-12p40 polypeptide comprises SEQ ID NO: 204 shown in the IL-12 Cytokine Moieties table below. In some embodiments, the IL-I²p40 polypeptide comprises an amino acid sequence having at least one amino acid modification as compared to the amino acid sequence of SEQ ID NO: 204 shown in the IL-12 Cytokine Moieties table below. Each of the at least one amino acid modifications can be any amino acid modification, such as a substitution, insertion, or deletion. In some embodiments, the IL-12 cytokine or functional fragment thereof comprises an amino acid sequence having at least 1, at least 2, at least 3, at least 4, at least 5, at least 6, at least 7, at least 8, at least 9, or at least 10 amino acid substitutions as compared to the amino acid sequence of SEQ ID NO: 204 shown in the IL-12 Cytokine Moieties table below. In some embodiments, the IL-A2 cytokine or functional fragment thereof comprises an amino acid sequence having at least 5 amino acid substitutions as compared to the amino acid sequence of SEQ ID NO: 204 shown in the IL-12 Cytokine Moieties table below.

[0401] The IL-12p40 polypeptide comprises a glycosaminoglycan (GAG)-binding domain (KSKREKKDRV). GAGs, such as heparin and heparan sulphate, have been shown to bind numerous growth factors and cytokines, including IL-12. The physiological significance of this binding is two-fold. First, GAGs can serve as co-receptors on cell surfaces to maintain high, local concentrations of cytokines. Second. GAGs can regulate bioactivities of growth factors and cytokines through multiple mechanisms including dimerization and protection from proteolytic degradation.

[0402] The GAG-binding domain in the mature form of the IL-12 p40 subunit is shown below in bold:

IWELKKDVYVVELDWYPDAPGEMWLTCDTPEEDGITWTLDQSSEVLGSG
KTLTIQVKEFGDAGQYTCHKGGEVLSHSLLLLHKKEDGIWSTDILKDQK
EPKNKTFLRCEAKNYSGRFTCWWLTTISTDLTFSVKSSRGSSDPQGVTC
GAATLSAERVRGDNKEYEYSVECQEDSACPAAEESLPIEVMVDAVHKLK
YENYTSSFFIRDIIKPDPPKNLQLKPLKNSRQVEVSWEYPDTWSTPHSY
FSLTFCVQVQGKSKREKKDRVFTDKTSATVICRKNASISVRAQDRYYSS
SWSEWASVPCS

[0403] Modifications to the GAG-binding domain (KSKREKKDRV) has been shown herein to increase the PK profile of constructs comprising an IL-12 cytokine with a mutated GAG-binding domain, without any decrease in cytokine activity. Thus, in some embodiments, the IL-12p40 polypeptide comprises at least one amino acid modification to the GAG-binding domain. In some embodiments, the modification to the GAG-binding domain is a deletion mutation. In some embodiments, the modification to the GAG-binding domain is a deletion mutation and at least one substitution mutation.

[0404] In some embodiments, the GAG-binding domain comprises the amino acid sequence KDNTERV. In some embodiments, the IL-12p40 polypeptide comprises the amino acid sequence SEQ ID NO: 205 shown in the IL-12 Cytokine Moieties table below. In some embodiments, the GAG-binding domain comprises the amino acid sequence KDNTEGRV. In some embodiments, the it-12p40 polypeptide comprises the amino acid sequence SEQ ID NO: 206 shown in the IL-12 Cytokine Moieties table below.

[0405] In some embodiments, the GAG-binding domain consists of the amino acid sequence KDNTERV. In some embodiments, the IL-12p40 polypeptide comprises the amino acid sequence SEQ ID NO: 205 shown in the IL-12 Cytokine Moieties table below. In some embodiments, the GAG-binding domain consists of the amino acid sequence KDNTEGRV. In some embodiments, the IL-12p40 polypeptide comprises the amino acid sequence SEQ ID NO: 206 shown in the IL-12 Cytokine Moieties table below.

[0406] In some embodiments, the IL-12p40 polypeptide comprises an amino acid sequence having one or more cysteine substitutions as compared to the amino acid sequence of SEQ ID NO: 204 shown in the IL-12 Cytokine Moieties table below. In some embodiments, the IL-12p40 polypeptide comprises an amino acid sequence having an amino acid substitution at position C252 as compared to the amino acid sequence of SEQ ID NO: 204 shown in the IL-12 Cytokine Moieties table below. In some embodiments, the amino acid substitution at position C252 is C252S. In some embodiments, the IL-12p40 polypeptide comprises an amino acid sequence of SEQ ID NO: 207 shown in the IL-12 Cytokine Moieties table below. In some embodiments, the IL-12p40 polypeptide comprises an amino acid sequence having about or at least about 85%, 86%, 87%, 88%, 89%, 90%, 91%, 92%, 93%, 94%, 95%, 96%, 97%, 98%, or 99% sequence identity to the amino acid sequence of SEQ ID NO: 207 shown in the IL-12 Cytokine Moieties table below. In some embodiments, the IL-12p40 polypeptide consists of an amino acid sequence of SEQ ID NO: 207 shown in the IL-12 Cytokine Moieties table below.

[0407] In some embodiments, the IL-12p40 polypeptide comprises an amino acid sequence having one or more cysteine substitutions as compared to the amino acid sequence of SEQ ID NO: 204 shown in the IL-12 Cytokine Moieties table below, and at least one amino acid modification to the GAG-binding domain. In some embodiments, the IL-12p40 polypeptide comprises an amino acid substitution at position C252S as compared to the amino acid sequence of SEQ ID NO: 204 shown in the IL-12 Cytokine Moieties table below, and the GAG-binding domain comprises the amino acid sequence KDNTERV. In some embodiments, the IL-12p40 polypeptide comprises an amino acid substitution at position C252S as compared to the amino acid sequence of SEQ ID NO: 204 shown in the IL-12 Cytokine Moieties table below, and the GAG-binding domain comprises the amino acid sequence KDNTEGRV. In some embodiments, the IL-12p40 polypeptide comprises an amino acid sequence of SEQ ID NO: 208 shown in the IL-12 Cytokine Moieties table below. In some embodiments, the IL-12p40 polypeptide comprises an amino acid sequence having about or at least about 85%, 86%, 87%, 88%, 89%, 90%, 91%, 92%, 93%, 94%, 95%, 96%, 97%, 98%, or 99% sequence identity to the amino acid sequence of SEQ ID NO: 208 shown in the IL-12 Cytokine Moieties table below. In some embodiments, the IL-12p40 polypeptide consists of an amino acid sequence of SEQ ID NO: 208 shown in the IL-12 Cytokine Moieties table below.

[0408] In some embodiments, the IL-12p35 polypeptide comprises SEQ ID NO: 209 shown in the IL-12 Cytokine Moieties table below. In some embodiments, the IL-12p35 polypeptide comprises an amino acid sequence having at least one amino acid modification as compared to the amino acid sequence of SEQ ID NO: 209 shown in the IL-12 Cytokine Moieties table below. Each of the at least one amino acid modifications can be any amino acid modification, such as a substitution, insertion, or deletion. In some embodiments, the IL-12 cytokine or functional fragment thereof comprises an amino acid sequence having at least 1, at least 2, at least 3, at least 4, at least 5, at least 6, at least 7, at least 8, at least 9, or at least 10 amino acid substitutions as compared to the amino acid sequence of SEQ ID NO: 20) shown in the IL-12 Cytokine Moieties table below. In some embodiments, the IL-12 cytokine or functional fragment thereof comprises an amino acid sequence having at least 5 amino acid substitutions as compared to the amino acid sequence of SEQ ID NO: 209 shown in the IL-12 Cytokine Moieties table below.

[0409] In some embodiments, the IL-12p40-IL-12p35 linker is between 5 and 20 amino acids in length.

[0410] In some embodiments, the IL-12p40-IL-12p35 linker is rich in amino acid residues G and S.

[0411] In some embodiments, the IL-12p40-IL-12p35 linker only includes amino acid residue types selected from the group consisting of G and S.

[0412] In some embodiments, the IL-12p40-IL-12p35 linker includes [(G)ₙS], where n=4 or 5.

[0413] In some embodiments, the IL-12p40-IL-12p35 linker includes a (GGGGS) repent.

[0414] In some embodiments, IL-12p40-IL-12p35 linker comprises SEQ ID NO: 116. (GGGGSGGGGSGGGGS)

[0415] In some embodiments, the IL-12 cytokine or functional fragment thereof comprises SEQ ID NO: 210 shown in the IL-12 Cytokine Moieties table below. In some embodiments, the IL-12 cytokine or functional fragment thereof comprises an amino acid sequence having at least one amino acid modification as compared to the amino acid sequences of SEQ ID NO: 204 and 209 shown in the IL-12 Cytokine Moieties table below. Each of the at least one amino acid modifications can be any amino acid modification, such as a substitution, insertion, or deletion. In some embodiments, the IL-12 cytokine or functional fragment thereof comprises an amino acid sequence having at least 1, at least 2, at least 3, at least 4, at least 5, at least 6, at least 7, at least 8, at least 9, or at least 10 amino acid substitutions as compared to the amino acid sequences of SEQ ID NO: 204 and 209 shown in the IL-12 Cytokine Moieties table below. In some embodiments, the IL-12 cytokine or functional fragment thereof comprises an amino acid sequence having at least 5 amino acid substitutions as compared to the amino acid sequences of SEQ ID NO: 204 and 209 shown in the IL-12 Cytokine Moieties table below.

[0416] In some embodiments, the IL-12 cytokine or functional fragment thereof comprises the amino acid sequence of SEQ ID NO: 210 shown in the IL-12 Cytokine Moieties table below. In some embodiments, the IL-12 cytokine or functional fragment thereof comprises an amino acid sequence having about or at least about 85%, 86%, 87%, 88%, 89%, 90%, 91%, 92%, 93%, 94%, 95%, 96%, 97%, 98%, or 99% sequence identity to the amino acid sequence of SEQ ID NO: 210 shown in the IL-12 Cytokine Moieties table below.

[0417] In some embodiments, the IL-12 cytokine or functional fragment thereof comprises the amino acid sequence of SEQ ID NO: 211 shown in the IL-12 Cytokine Moieties table below. In some embodiments, the IL-12 cytokine or functional fragment thereof comprises an amino acid sequence having about or at least about 85%, 86%, 87%, 88%, 89%, 90%, 91%, 92%, 93%, 94%, 95%, 96%, 97%, 98%, or 99% sequence identity to the amino acid sequence of SEQ ID NO: 211 shown in the IL-12 Cytokine Moieties table below.

[0418] In some embodiments, the IL-12 cytokine or functional fragment thereof comprises the amino acid sequence of SEQ ID NO: 212. In some embodiments, the IL-12 cytokine or functional fragment thereof comprises an amino acid sequence having about or at least about 85%, 86%, 87%, 88%, 89%, 90%, 91%, 92%, 93%, 94%, 95%, 96%, 97%, 98%, or 99% sequence identity to the amino acid sequence of SEQ ID NO: 212 shown in the IL-12 Cytokine Moieties table below.

[0419] In some embodiments, the IL-12 cytokine or functional fragment thereof comprises the amino acid sequence of SEQ ID NO: 213 shown in the IL-12 Cytokine Moieties table below. In some embodiments, the IL-12 cytokine or functional fragment thereof comprises an amino acid sequence having about or at least about 85%, 86%, 87%, 88%, 89%, 90%, 91%, 92%, 93%, 94%, 95%, 96%, 97%, 98%, or 99% sequence identity to the amino acid sequence of SEQ ID NO: 213 shown in the IL-12 Cytokine Moieties table below.

[0420] In some embodiments, the IL-12 cytokine or functional fragment thereof comprises the amino acid sequence of SEQ ID NO: 214 shown in the IL-12 Cytokine Moieties table below. In some embodiments, the IL-12 cytokine or functional fragment thereof comprises an amino acid sequence having about or at least about 85%, 86%, 87%, 88%, 89%, 90%, 91%, 92%, 93%, 94%, 95%, 96%, 97%, 98%, or 99% sequence identity to the amino acid sequence of SEQ ID NO: 214 shown in the IL-12 Cytokine Moieties table below.

TABLE
IL-12 Cytokine Moieties:

| Component | | SEQ ID NO | Sequence |
|---|---|---|---|
| hIL12B | IL-12 | 204 | IWELKKDVYWELDWYPDAPGEMWLTCDTPEED |
| | p40 | | GITWTLDQSSEVLGSGKTLTIQVKEFGD |
| | subunit | | AGQYTCHKGGEVLSHSLLLLHKKEDGIWSTDILKD |
| | | | QKEPKNKTFLRCEAKNYSGRFTCWWLTTI |
| | | | STDLTFSVKSSRGSSDPQGVTCGAATLSAERVRGD |
| | | | NKEYEYSVECQEDSACPAAEESLPIEVMV |
| | | | DAVHKLKYENYTSSFFIRDIIKPDPPKNLQLKPLKNSR |
| | | | QVEVSWEYPDTWSTPHSYFSLTFCVQV |
| | | | QGKSKREKKDRVFTDKTSATVICR |
| | | | KNASISVRAQDRYYSSSWSEWASV |
| | | | PCS |
| | IL-12 | 205 | IWELKKDVYVVELDWYPDAPGEMWLTCDTPEEDGITW |
| | p40 | | TLDQSSEVLGSGKTLTIQVKEFGDAGQYTCHKGGEVL |
| | subunit | | SHSLLLLHKKEDGIWSTDILKDQ |
| | [KDNTERV] | | KEPKNKTFLRCEAKNYSGRFTCWWLTTISTDLTFSVK |
| | IL-12 | | SSRGSSDPQGVTCGAATLSAERV |
| | p40 | | RGDNKEYEYSVECQEDSACPAAEESLPIEVMVDAVHK |
| | subunit | | LKYENYTSSFFIRDIIKPDPPKN |
| | [KDNTEGRV] | | LQLKPLKNSRQVEVSWEYPDTWSTPHSYFSLTFCVQ |
| | | | VQGKDNTERVFTDKTSATVICRKNASISVRAQDRYY |
| | | | SSSWSEWASVPCS |
| | IL-12 | 206 | IWELKKDVYVVELDWYPDAPGEMWLTCDTPEEDGITW |
| | p40 | | TLDQSSEVLGSGKTLTIQVKEFGDAGQYTCHKGGEVLSH |
| | subunit | | SLLLLHKKEDGIWSTDILKDQ |
| | {C252S] | | KEPKNKTFLRCEAKNYSGRFTCWWLTTISTDLTFSVKSSR |
| | | | GSSDPQGVTCGAATLSAERV |
| | | | RGDNKEYEYSVECQEDSACPAAEESLPIEVMVDAVHKLK |
| | | | YENYTSSFFIRDIIKPDPPKN |
| | | | LQLKPLKNSRQVEVSWEYPDTWSTPHSYFSLTFCVQVQG |
| | | | KDNTEGRVFTDKTSATVICRKNASISVRAQDRYYSSSWS |
| | | | EWASVPCS |
| | | 207 | IWELKKDVYWELDWYPDAPGEMWLTCDTPEEDGITW |
| | | | TLDQSSEVLGSGKTLTIQVKEFGDAGQYTCHKGGEVLSHS |
| | | | LLLLHKKEDGIWSTDILKDQKEPKNKTFLRCEAKNYSGRF |
| | | | TCWWLTTISTDLTFSVKSSRGSSDPQGVTCGAATLSAERV |
| | | | RGDNKEYEYSVECQEDSACPAAEESLPIEVMVDAVHKLK |
| | | | YENYTSSFFIRDIIKPDPPKNLQLKPLKNSRQVEVSWEYP |
| | | | DTWSTPHSYFSLTFSVQVQGKSKREKKDRVFTDKTSATV |
| | | | ICRKNASISVRAQDRYYSSSWSEWASVPCS |
| | p40 | 208 | IWELKKDVYVVELDWYPDAPGEMVVLTCDTPEEDGITW |
| | subunit | | TLDQSSEVLGSGKTLTIQVKEFGDAGQYTCHKGGEVLS |
| | [KDNTEGRV] + | | HSLLLLHKKEDGIWSTDILKDQKEPKNKTFLRCEAKNYS |
| | [C25S] | | GRFTCWWLTTISTDLTFSVKSSRGSSDPQGVTCGAATLS |
| | | | AERVRGDNKEYEYSVECQEDSACPAAEESLPIEVMVDA |
| | | | VHKLKYENYTSSFFIRDIIKPDPPKNLQLKPLKNSRQVEV |
| | | | SWEYPDTWSTPHSYFSLTFSVQVQGKDNTEGRVFTDKTS |
| | | | ATVICRKNASISVRAQDRYYSSSWSEWASVPCS |
| hIL12A | IL-12 | 209 | RNLPVATPDPGMFPCLHHSQNLLRAVSNMLQKARQTLE |
| | p35 | | FYPCTSEEIDHEDITKDKTSTVEACLPLE |
| | subunit | | LTKNESCLNSRETSF1TNGSCLASRKTSFMMALCLSSIYE |
| | | | DLKMYQVEFKTMNAKLLMDPKRQIFLDQ |
| | | | NMLAVIDELMQALNFNSETVPQKSSLEEPDFYKTKIKLCIL |
| | | | LHAFRIRAVTIDRVMSYLNAS |
| Cytokine | hIL12B- | 210 | IWELKKDVYWELDWYPDAPGEMWLTCDTPEEDGIT |
| | hIL12A | | WTLDQSSEVLGSGKTLTIQVKEFGD |
| | | | AGQYTCHKGGEVLSHSLLLLHKKEDGIWSTD1LKDQK |
| | | | EPKNKTFLRCEAKNYSGRFTCWWLT |
| | | | TISTDLTFSVKSSRGSSDPQGVTCGAATLSAERVRGDN KEYEYSVECQEDSACPAAEESLPIEV |
| | | | MVDAVHKLKYENYTSSFFIRDIIKPDPPKNLQLKPLKN |
| | | | SRQVEVSWEYPDTWSTPHSYFSLTF |
| | | | CVQVQGKSKREKKDRVFTDKTSATVICRKNASISVR |
| | | | AQDRYYSSSWSEWASVPCSGGGGS |
| | | | GGGGSGGGGSRNLPVATPDPGMFPCLHHSQNLLRAVS |
| | | | NMLQKARQTLEFYPCTSEEIDHE |
| | | | DITKDKTSTVEACLPLELTKNESCLNSRETSFITNGSCL |
| | | | ASRKTSFMMALCLSSIYEDLKMYQVE |
| | | | FKTMNAKLLMDPKRQIFLDQNMLAVIDELMQALNFNS |
| | | | ETVPQKSSLEEPDFYKTKIKLCILLHA |
| | | | FRIRAVTIDRVMSYLNAS |
| | hIL12B- | 211 | IWELKKDVYVVELDWYPDAPGEMWLTCDTPEEDG |
| | hIL12A | | ITWTLDQSSEVLGSGKTLTIQVKEFGD |
| | [KDNTERV] | | AGQYTCHKGGEVLSHSLLLLHKKEDGIWSTDILKDOK |
| | | | EPKNKTFLRCEAKNYSGRFTCWWLT |
| | | | TISTDLTFSVKSSRGSSDPQGVTCGAATLSAERVRGD |
| | | | NKEYEYSVECQEDSACPAAEESLPIEV |
| | | | MVDAVHKLKYENYTSSFFIRDIIKPDPPKNLQLKPLK |
| | | | NSRQVEVSWEYPDTWSTPHSYFSLTF |
| | | | CVQVQGKDNTERVFTDKTSATVICRKNASISVRAQD |
| | | | RYYSSSWSEWASVPCSGGGGS |
| | | | GGGGSGGGGSRNLPVATPDPGMFPCLHHSQNLLRAV |
| | | | SNMLQKARQTLEFYPCTSEEIDHE |
| | | | DITKDKTSTVEACLPLELTKNESCLNSRETSFITNGSC |
| | | | LASRKTSFMMALCLSSIYEDLKMYQVE |
| | | | FKTMNAKLLMDPKRQIFLDQNMLAVIDELMQALNF |
| | | | NSETVPQKSSLEEPDFYKTKIKLCILLHA |
| | | | FRIRAVTIDRVMSYLNAS |
| | hIL12B- | 212 | IWELKKDVYVVELDWYPDAPGEMWLTCDTPEEDGI |
| | hIL12A | | TWTLDQSSEVLGSGKTLTIQVKEFGD |
| | [KDNTEGRV] | | AGQYTCHKGGEVLSHSLLLLHKKEDGIWSTDILKDQK |
| | | | EPKNKTFLRCEAKNYSGRFTCWWLT |
| | | | TISTDLTFSVKSSRGSSDPQGVTCGAATLSAERVRGD |
| | | | NKEYEYSVECQEDSACPAAEESLPIEV |
| | | | MVDAVHKLKYENYTSSFFIRDIIKPDPPKNLQLKPLKN |
| | | | SRQVEVSWEYPDTWSTPHSYFSLTF |
| | | | CVQVQGKDNTEGRVFTDKTSATVICRKNASISVRAQD |
| | | | RYYSSSWSEWASVPCSGGGGS |
| | | | GGGGSGGGGSRNLPVATPDPGMFPCLHHSQNLLRAV |
| | | | SNMLQKARQTLEFYPCTSEEIDHE |
| | | | DITKDKTSTVEACLPLELTKNESCLNSRETSFITNGSC |
| | | | LASRKTSFMMALCLSSIYEDLKMYQVE |
| | | | FKTMNAKLLMDPKRQIFLDQNMLAVIDELMQALNF |
| | | | NSETVPQKSSLEEPDFYKTKIKLCILLHA |
| | | | FRIRAVTIDRVMSYLNAS |
| | hIL12B- | 213 | IWELKKDVYVVELDWYPDAPGEMWLTCDTPEEDGI |
| | hIL12A | | TWTLDQSSEVLGSGKTLTIQVKEFGDAGQYTCHKGGE |
| | [C252S] | | VLSHSLLLLHKKEDGIWSTDILKDQKEPKNKTFLRCE |
| | | | AKNYSGRFTCWWLTTISTDLTFSVKSSRGSSDPQGVT |
| | | | CGAATLSAERVRGDNKEYEYSVECQEDSACPAAEES |
| | | | LPIEVMVDAVHKLKYENYTSSFFIRDIIKPDPPKNLQL |
| | | | KPLKNSRQVEVSWEYPDTWSTPHSYFSLTFSVQVQG |
| | | | KSKREKKDRWTDKTSATVICRKNASISVRAQDRYYS |
| | | | SSWSEWASVPCSGGGGSGGGGSGGGGSRNLPVATPD |
| | | | PGMFPCLHHSQNLLRAVSNMLQKARQTLEFYPCTSE |
| | | | ETDHEDITKDKTSTVEACLPLELTKNESCLNSRETSFI |
| | | | TNGSCLASRKTSFMMALCLSSIYEDLKMYQVEFKTM |
| | | | NAKLLMDPKRQIFLDQNMLAVIDELMQALNFNSETV |
| | | | PQKSSLEEPDFYKTKIKLCILLHAFRIRAVTIDRVMSYLNAS |
| | hIL12B- | 214 | IWELKKDVYVVELDWYPDAPGEMWLTCDTPEEDG |
| | hIL12A | | ITWTLDQSSEVLGSGKTLTIQVKEFGDAGQYTCHKGGE |
| | [KDNTEGRV] + | | VLSHSLLLLHKKEDGIWSTDILKDQKEPKNKTFLRCEA |
| | [C252S] | | KNYSGRFTCWWLTTISTDLTFSVKSSRGSSDPQGVTCG |
| | | | AATLSAERVRGDNKEYEYSVECQEDSACPAAEESLPIE |
| | | | VMVDAVHKLKYENYTSSFFIRDIIKPDPPKNLQLKPLK |
| | | | NSRQVEVSWEYPDTWSTPHSYFSLTFSVQVQGKDNTE |
| | | | GRVFTDKTSATVICRKNASISVRAQDRYYSSSWSEWAS |
| | | | VPCSGGGGSGGGGSGGGGSRNLPVATPDPGMFPCLHH |
| | | | SQNLLRAVSNMLQKARQTLEFYPCTSEEIDHEDITKDKT |
| | | | STVEACLPLELTKNESCLNSRETSFITNGSCLASRKTSFM |
| | | | MALCLSSIYEDLKMYQVEFKTMNAKLLMDPKRQEFLDQ |
| | | | NMLAVIDELMQALNFNSETVPQKSSLEEPDFYKTKIKLC |
| | | | ILLHAFRIRAVTIDRVMSYLNAS |

[0421] In some embodiments, the IL-12 cytokine moiety has an amino acid sequence as shown by one of the sequences in the table above.

### (b) IL-12 Masking Moieties

[0422] Provided herein is a masking moiety for use in masking a therapeutic moiety comprising an IL-12 cytokine or functional fragment thereof.

[0423] It will be understood that the masking moiety is cleaved from the masked cytokine to form the cleavage product thereof. The masking moiety masks the IL-12 cytokine or functional fragment thereof in the masked cytokine thereby reducing or preventing binding of the IL-cytokine or functional fragment thereof to its cognate receptor.

[0424] The IL-12 receptor, beta 1, or IL-12Rβ1 is a subunit of the IL-12 receptor complex. IL-12Rβ1 is also known as CD212. This protein binds to interleukin-12 (IL-12) with a low affinity. This protein forms a disulfide-linked oligomer, which is required for its IL-12 binding activity. The IL-12 receptor, beta 2, or IL-12Rβ2 is a subunit of the IL-12 receptor complex. The coexpression of IL-12Rβ1 and IL-12Rβ2 protein has been shown to lead to the formation of high-affinity IL-12 binding sites.

[0425] Methods for determining the extent of binding of a protein (e.g., cytokine) to a cognate protein (e.g., cytokine receptor) are well known in the art.

[0426] In some embodiments, the masking moiety comprises an extracellular domain of an IL-12 cytokine receptor, or a subunit or functional fragment thereof.

[0427] Interleukin-12 receptor subunit beta-1, also called CD212 has the sequence:

MEPLVTWVVPLLFLFLLSRQGAACRTSECCFQDPPYPDADSGSASGPRD
LRCYRISSDRYECSWQYEGPTAGVSHFLRCCLSSGRCCYFAAGSATRLQ
FSDQAGVSVLYTVTLWVESWARNQTEKSPEVTLQLYNSVKYEPPLGDIK
VSKLAGQLRMEWETPDNQVGAEVQFRHRTPSSPWKLGDCGPQDDDTESC
LCPLEMNVAQEFQLRRRQLGSQGSSWSKWSSPVCVPPENPPQPQVRFSV
EQLGQDGRRRLTLKEQPTQLELPEGCQGLAPGTEVTYRLQLHMLSCPCK
AKATRTLHLGKMPYLSGAAYNVAVISSNQFGPGLNQTWHIPADTHTEPV
ALNISVGTNGTTMYWPARAQSMTYCIEWQPVGQDGGLATCSLTAPQDPD
PAGMATYSWSRESGAMGQEKCYYITIFASAHPEKLTLWSTVLSTYHFGG
NASAAGTPHHVSVKNHSLDSVSVDWAPSLLSTCPGVLKEYVVRCRDEDS
KQVSEHPVQPTETQVTLSGLRAGVAYTVQVRADTAWLRGVWSQPQRFSI
EVQVSDWLIFFASLGSFLSILLVGVLGYLGLNRAARHLCPPLPTPCASS
AIEFPGGKETWQWINPVDFQEEASLQEALVVEMSWDKGERTEPLEKTEL
PEGAPELALDTELSLEDGDRCKAKM

[0428] Interleukin-12 receptor subunit beta-2 has the sequence:

MAHTFRGCSLAFMFIITWLLIKAKIDACKRGDVTVKPSHVILLGSTVNI
TCSLKPRQGCFHYSRRNKLILYKFDRRINFHHGHSLNSQVTGLPLGTTL
FVCKLACINSDEIQICGAEIFVGVAPEQPQNLSCIQKGEQGTVACTWER
GRDTHLYTEYTLQLSGPKNLTWQKQCKDIYCDYLDFGINLTPESPESNF
TAKVTAVNSLGSSSSLPSTFTFLDIVRPLPPWDIRIKFQKASVSRCTLY
WRDEGLVLLNRLRYRPSNSRLWNMVNVTKAKGRHDLLDLKPFTEYEFQI
SSKLHLYKGSWSDWSESLRAQTPEEEPTGMLDVWYMKRHIDYSRQQISL
FWKNLSVSEARGKILHYQVTLQELTGGKAMTQNITGHTSWTTVIPRTGN
WAVAVSAANSKGSSLPTRINIMNLCEAGLLAPRQVSANSEGMDNILVTW
QPPRKDPSAVQEYVVEWRELHPGGDTQVPLNWLRSRPYNVSALISENIK
SYICYEIRVYALSGDQGGCSSILGNSKHKAPLSGPHINAITEEKGSILI
SWNSIPVQEQMGCLLHYRIYWKERDSNSQPQLCIIPYRVSQNSHPINSL
QPRVTYVLWMTALTAAGESSHGNEREFCLQGKANWMAFVAPSICIAIIM
VGIFSTHYFQQKVFVLLAALRPQWCSREIPDPANSTCAKKYPIAEEKTQ
LPLDRLLIDWPTPEDPEPLVISEVLHQVTPVFRHPPCSNWPQREKGIQG
HQASEKDMMHSASSPPPPRALQAESRQLVDLYKVLESRGSDPKPENPAC
PWTVLPAGDLPTHDGYLPSNIDDLPSHEAPLADSLEELEPQHISLSVFP
SSSLHPLTFSCGDKLTLDQLKMRCDSLML

[0429] The bold indicates the pro-peptide, the italics with underline indicates the extracellular domain, the italics indicates the transmembrane domain and the bold with underline indicates the cytoplasmic domain.

[0430] In some embodiments, the masking moiety comprises the extracellular domain of human IL-12Rβ1 or a fragment, portion, or variant thereof that retains or otherwise demonstrates an affinity to IL-12.

[0431] In some embodiments, the masking moiety comprises an amino acid sequence having an amino acid sequence of human IL-12Rβ1 with one to four amino acid substitutions. In some embodiments, the masking moiety comprises an amino acid sequence having an amino acid sequence of human IL-12Rβ1 with one or two amino acid substitutions.

[0432] In some embodiments, the masking moiety comprises residues 24 to 237 of human IL-12Rβ1, namely a sequence having SEQ ID NO: 215 as shown in the IL-12 Masking Moieties table below or a fragment, portion, or variant thereof that retains or otherwise demonstrates an affinity to IL-12. In some embodiments, the masking moiety comprises IL-12Rβ1 having SEQ ID NO: 215 as shown in the IL-12 Masking Moieties table below. In some embodiments, the masking moiety comprises an amino acid sequence having about or at least about 85%, 86%, 87%, 88%, 89%, 90%, 91%, 92%, 93%, 94%, 95%, 96%, 97%, 98%, or 99% sequence identity to any one of the amino acid sequence of SEQ ID NO: 215 as shown in the IL-12 Masking Moieties table below. In some embodiments, the masking moiety comprises an amino acid sequence having the amino acid sequence of SEQ ID NO: 215 as shown in the IL-12 Masking Moieties table below, with one to four amino acid substitutions. In some embodiments, the masking moiety comprises an amino acid sequence having the amino acid sequence of SEQ ID NO: 215 as shown in the IL-12 Masking Moieties table below, with one or two amino acid substitutions.

[0433] In some embodiments, the masking moiety comprises residues 24 to 545 of human IL-12Rβ1, namely a sequence having SEQ ID NO: 216 as shown in the IL-12 Masking Moieties table below or a fragment, portion, or variant thereof that retains or otherwise demonstrates an affinity to IL-12. In some embodiments, the masking moiety comprises IL-12Rβ1 having SEQ ID NO: 216 as shown in the IL-12 Masking Moieties table below. In some embodiments, the masking moiety comprises an amino acid sequence having about or at least about 85%, 86%, 87%, 88%, 89%, 90%, 91%, 92%, 93%, 94%, 95%, 96%, 97%, 98%, or 99% sequence identity to any one of the amino acid sequence of SEQ ID NO: 216 as shown in the IL-12 Masking Moieties table below. In some embodiments, the masking moiety comprises an amino acid sequence having the amino acid sequence of SEQ ID NO: 216 as shown in the IL-12 Masking Moieties table below, with one to four amino acid substitutions. In some embodiments, the masking moiety comprises an amino acid sequence having the amino acid sequence of SEQ ID NO: 216 as shown in the IL-12 Masking Moieties table below, with one or two amino acid substitutions.

[0434] In some embodiments, the masking moiety comprises the extracellular domain of human IL-12R02 or a fragment, portion, or variant thereof that retains or otherwise demonstrates an affinity to IL-12. In some embodiments, the masking moiety comprises an amino acid sequence having an amino acid sequence of human IL-12Rβ2 with one to four amino acid substitutions. In some embodiments, the masking moiety comprises an amino acid sequence having an amino acid sequence of human IL-12Rβ2 with one or two amino acid substitutions.

[0435] In some embodiments, the masking moiety comprises residues 24 to 212 of human IL-12Rβ2, namely a sequence having SEQ ID NO: 217 as shown in the IL-12 Masking Moieties table below. In some embodiments, the masking moiety comprises an amino acid sequence having about or at least about 85%, 86%, 87%, 88%, 89%, 90%, 91%, 92%, 93%, 94%, 95%, 96%, 97%, 98%, or 99% sequence identity to any one of the amino acid sequence of SEQ ID NO: 217 as shown in the IL-12 Masking Moieties table below. In some embodiments, the masking moiety comprises an amino acid sequence having the amino acid sequence of SEQ ID NO: 217 as shown in the IL-12 Masking Moieties table below, with one to four amino acid substitutions. In some embodiments, the masking moiety comprises an amino acid sequence having the amino acid sequence of SEQ ID NO: 217 as shown in the IL-12 Masking Moieties table below, with one or two amino acid substitutions.

[0436] In some embodiments, the masking moiety comprises residues 24 to 222 of human IL-12Rβ2, namely a sequence having SEQ ID NO: 218 as shown in the IL-12 Masking Moieties table below. In some embodiments, the masking moiety comprises an amino acid sequence having about or at least about 85%, 86%, 87%, 88%, 89%, 90%, 91%, 92%, 93%, 94%, 95%, 96%, 97%, 98%, or 99% sequence identity to any one of the amino acid sequence of SEQ ID NO: 218 as shown in the IL-12 Masking Moieties table below. In some embodiments, the masking moiety comprises an amino acid sequence having the amino acid sequence of SEQ ID NO: 218 as shown in the IL-12 Masking Moieties table below, with one to four amino acid substitutions. In some embodiments, the masking moiety comprises an amino acid sequence having the amino acid sequence of SEQ ID NO: 218 as shown in the IL-12 Masking Moieties table below, with one or two amino acid substitutions.

[0437] In some embodiments, the masking moiety comprises residues 24 to 319 of human IL-12Rβ2, namely a sequence having SEQ ID NO: 219 as shown in the IL-12 Masking Moieties table below. In some embodiments, the masking moiety comprises an amino acid sequence having about or at least about 85%, 86%, 87%, 88%, 89%, 90%, 91%, 92%, 93%, 94%, 95%, 96%, 97%, 98%, or 99% sequence identity to any one of the amino acid sequence of SEQ ID NO: 219 as shown in the IL-12 Masking Moieties table below. In some embodiments, the masking moiety comprises an amino acid sequence having the amino acid sequence of SEQ ID NO: 219 as shown in the IL-12 Masking Moieties table below, with one to four amino acid substitutions. In some embodiments, the masking moiety comprises an amino acid sequence having the amino acid sequence of SEQ ID NO: 219 as shown in the IL-12 Masking Moieties table below, with one or two amino acid substitutions.

[0438] In some embodiments, the masking moiety comprises residues 24 to 319 of human IL-12Rβ2, namely a sequence having SEQ ID NO: 219 as shown in the IL-12 Masking Moieties table below, with one or more cysteine substitutions. In some embodiments, the masking moiety comprises residues 24 to 319 of human IL-12Rβ2, namely a sequence having SEQ ID NO: 219 as shown in the IL-12 Masking Moieties table below, with an amino acid substitution at position C242. In some embodiments, the amino acid substitution is at position C242 is C242S. In some embodiments, the masking moiety comprises an amino acid sequence of SEQ ID NO: 220 as shown in the IL-12 Masking Moieties table below. In some embodiments, the masking moiety comprises an amino acid sequence having about or at least about 85%, 86%, 87%, 88%, 89%, 90%, 91%, 92%, 93%, 94%, 95%, 9%, 97%, 98%, or 99% sequence identity to the amino acid sequence of SEQ ID NO: 220 as shown in the IL-12 Masking Moieties table below. In some embodiments, the masking moiety consists of an amino acid sequence of SEQ ID NO: 220 as shown in the IL-12 Masking Moieties table below. In some embodiments, the masking moiety comprises residues 24 to 622 of human IL-12Rβ2, namely a sequence having SEQ ID NO: 221 as shown in the IL-12 Masking Moieties table below. In some embodiments, the masking moiety comprises an amino acid sequence having about or at least about 85%, 86%, 87%, 88%, 89%, 90%, 91%, 92%, 93%, 94%, 95%, 96%, 97%, 98%, or 99% sequence identity to any one of the amino acid sequence of SEQ ID NO: 221 as shown in the IL-12 Masking Moieties table below. In some embodiments, the masking moiety comprises an amino acid sequence having the amino acid sequence of SEQ ID NO: 221 as shown in the IL-12 Masking Moieties table below, with one to four amino acid substitutions. In some embodiments, the masking moiety comprises an amino acid sequence having the amino acid sequence of SEQ ID NO: 221 as shown in the IL-12 Masking Moieties table below, with one or two amino acid substitutions.

[0439] In some embodiments, the masking moiety comprises residues 24 to 227 of human IL-12Rβ2, namely a sequence having SEQ ID NO: 222 as shown in the IL-12 Masking Moieties table below. In some embodiments, the masking moiety comprises an amino acid sequence having about or at least about 85%, 86%, 87%, 88%, 89%, 90%, 91%, 92%, 93%, 94%, 95%, 96%, 97%, 98%, or 99% sequence identity to any one of the amino acid sequence of SEQ ID NO: 222 as shown in the IL-12 Masking Moieties table below. In some embodiments, the masking moiety comprises an amino acid sequence having the amino acid sequence of SEQ ID NO: 222 as shown in the IL-12 Masking Moieties table below, with one to four amino acid substitutions. In some embodiments, the masking moiety comprises an amino acid sequence having the amino acid sequence of SEQ ID NO: 222 as shown in the IL-12 Masking Moieties table below, with one or two amino acid substitutions.

TABLE
IL-12 Masking Moicties:

| | | SEQ ID | |
|---|---|---|---|
| Component | | NO | Sequence |
| Masking | hCD212 | 215 | CRTSECCFQDPPYPDADSGSASGPRDLRCYRISSDRYECSWQYE |
| moiety | (24-237) | | GPTAGVSHFLRCCLSS |
| (MM) | | | GRCCYFAAGSATRLQFSDQAGVSVLYTVTLWVESWARNQTEKS |
| | | | PEVTLQLYNSVKYEP |
| | | | PLGDIKVSKLAGQLRMEWETPDNQVGAEVQFRHRTPSSPWKLG |
| | | | DCGPQDDDTESCLC |
| | | | PLEMNVAQEFQLRRRQLGSQGSSWSKWSSPVCVPPENP |
| | hCD212 | 216 | CRTSECCFQDPPYPDADSGSASGPRDLRCYRISSDRYECSWQYE |
| | (24-545) | | GPTAGVSHFLRCCLS |
| | | | SGRCCYFAAGSATRLQFSDQAGVSVLYTVTLWVESWARNQTEK |
| | | | SPEVTLQLYNSVKYEP |
| | | | PLGDIKVSKLAGQLRMEWETPDNQVGAEVQFRHRTPSSPWKLG |
| | | | DCGPQDDDTESCLCP |
| | | | LEMNVAQEFQLRRRQLGSQGSSWSKWSSPVCVPPENPPQPQVRF |
| | | | SVEQLGQDGRRRL |
| | | | TLKEQPTQLELPEGCQGLAPGTEVTYRLQLHMLSCPCKAKATRT |
| | | | LHLGKMPYLSGAAY |
| | | | NVAVISSNQFGPGLNQTWHIPADTHTEPVALNISVGTNGTTMYW |
| | | | PARAQSMTYCIEW |
| | | | QPVGQDGGLATCSLTAPQDPDPAGMATYSWSRESGAMGQEKC |
| | | | YYITIFASAHPEKLTL |
| | | | WSTVLSTYHFGGNASAAGTPHHVSVKNHSLDSVSVDWAPSLLS |
| | | | TCPGVLKEYVVRCRDE |
| | | | DSKQVSEHPVQPTETQVTLSGLRAGVAYTVQVRADTAWLRGV |
| | | | WSQPORFSIEVQVSD |
| | IL12RB2 | 217 | KIDACKRGDYTVKPSHVILLGSTVNITCSLKPRQGCFHYSRRNKL |
| | (24-212) | | ILYKFDRRINFHHGHSL |
| | | | NSQVTGLPLGTTLFVCKLACINSDEIQICGAEIFVGVAPEQPQNLS |
| | | | CIQKGEQGTVACTWE |
| | | | RGRDTHLYTEYTLQLSGPKNLTWQKQCKDIYCDYLDFGINLTPE |
| | | | SPESNFTAKVTAVNSL |
| | | | GSSSSL |
| | ILI2RB2 | 218 | KIDACKRGDVTVKPSHVILLGSTVNITCSLKPRQGCFHYSRRNKL |
| | (24-222) | | ILYKFDRRINFHHGHSLN |
| | | | SQVTGLPLGTTLFVCKLACINSDEIQICGAEIFVGVAPEQPQNLSC |
| | | | IQKGEQGTVACTWER |
| | | | GRDTHLYTEYTLQLSGPKNLTWQKQCKDIYCDYLDFGINLTPES |
| | | | PESNFTAKVTAVNSLGS |
| | | | SSSLPSTFTFLDIV |
| | ILI2RB2 | 219 | KIDACKRGDVTVKPSHVILLGSTVNITCSLKPRQGCFHYSRRNKL |
| | (24-319) | | ILYKFDRRINFHHGHSL |
| | | | NSQVTGLPLGTTLFVCKLACINSDEIQICGAEIFVGVAPEQPQNLS |
| | | | CIQKGEQGTVACTW |
| | | | ERGRDTHLYTEYTLQLSGPKNLTWQKQCKDIYCDYLDFGINLTP |
| | | | ESPESNFTAKVTAVNSL |
| | | | OSSSSLPSTFTFLDIVRPLPPWDIRIKFQKASVSRCTLYWRDEGLV |
| | | | LLNRLRYRPSNSRLWNM |
| | | | VNVTKAKGRHDLLDLKPFTEYEFQISSKLHLYKGSWSDWSESLR |
| | | | AQTPEE |
| | ILI2RB2 | 220 | KIDACKRGDVTVKPSHVILLGSTVNITCSLKPRQGCFHYSRRNKL |
| | (24-319) | | ILYKFDRRINFHHGHSL |
| | [C242S] | | NSQVTGLPLGTTLFVCKLACINSDEIQICGAEIFVGVAPEQPQNLS |
| | | | CIQKGEQGTVACTWER |
| | | | GRDTHLYTEYTLQLSGPKNLTWQKQCKDIYCDYLDFGINLTPES |
| | | | PESNFTAKVTAVNSLG |
| | | | SSSSLPSTFTFLDIVRPLPPWDIRIKPQKASVSRSTLYWRDEGLVL |
| | | | LNRLRYRPSNSRLWNM |
| | | | VNVTKAKGRHDLLDLKPFTEYEFQISSKLHLYKGSWSDWSESLR |
| | | | AQTPEE |
| | ILI2RB2 | 221 | KIDACKRGDVTVKPSHVILLGSTVNITCSLKPRQGCFHYSRRNKL |
| | (24-622) | | ILYKFDRRINFHHGHSLNS |
| | | | QVTGLPLGTTLFVCKLACINSDEIQICGAEIFVGVAPEQPQNLSCI |
| | | | QKOEQOTVACTWERGR |
| | | | DTHLYTEYTLQLSGPKNLTWQKQCKDIYCDYLDFGINLTPESPES |
| | | | NFTAKVTAVNSLGSSSSL |
| | | | PSTFTFLDIVRPLPPWDIRIKFQKASVSRCTLYWRDEGLVLLNRL |
| | | | RYRPSNSRLWNMVNVTK |
| | | | AKORHDLLDLKPFTEYEFQISSKLHLYKGSWSDWSESLRAQTPE |
| | | | EEPTGMLDVWYMKRHID |
| | | | YSRQQISLFWKNLSVSEARGKILHYQVTLQELTGGKAMTQNITG |
| | | | HTSWTTVIPRTGNWAVA |
| | | | VSAANSKGSSLPTRINIMNLCEAGLLAPRQVSANSEGMDNILVT |
| | | | WQPPRKDPSAVQEYVVE |
| | | | WRELHPGGDTQVPLNWLRSRPYNVSALISENIKSYICYEIRVYAL |
| | | | SGDQGGCSSILONSKHKAP |
| | | | LSGPHINAITEEKGSILISWNSIPVQEQMGCLLHYRIYWKERDSNS |
| | | | QPQLCEIPYRVSQNSHPIN |
| | | | SLQPRVTYVLWMTALTAAGESSHGNEREFCLQGKAN |
| | ILI2RB2 | 222 | KIDACKRGDVTVKPSHVILLGSTVNITCSLKPRQGCFHYSRRNKL |
| | (24-227) | | ILYKFDRRINFHHGHSLNSQVTG |
| | | | LPLGTTLFVCKLACINSDEIQICGAEIFVGVAPEQPQNLSCIQKGE |
| | | | QGTVACTWERGRDTHLYTEYTL |
| | | | QLSGPKNLTWQKQCKDIYCDYLDFGINLTPESPESNFTAKVTAV |
| | | | INSLOSSSSLPSTFTFLDIVRPLPP |

[0440] In some embodiments, the IL-12 masking moiety has an amino acid sequence as shown by one of the sequences in the table above.

[0441] 1.1.3 IL-15 Cytokine Moieties and IL-15 Masking Moieties

### (a) IL-15 Cytokine Moieties

[0442] In some embodiments, the therapeutic moiety comprises an IL-15 cytokine or functional fragment thereof.

[0443] IL-15 is an interleukin, which is a type of cytokine signalling molecule in the immune system that regulates activities of white blood cells.

[0444] In eukaryotic cells, IL-15 is synthesized as a precursor polypeptide of 162 amino acids, which is then processed into mature IL-15 by the removal of amino acid residues 1-48. This results in a mature form of IL-15 consisting of 114 amino acids (amino acid residues 49-162) that is secreted in a mature, active form.

IL-15 precursor polypeptide:
MRISKPHLRSISIQCYCLLLNSHFLTEAGIHVFILGCFSAGLPKTEANWVNVISKLKKIEDLIQSM
HIDATLYTESDVHPSCKVTAMKCFLLELQVISLESGDASIHDTVENLIILANNSLSSNGNVTESGC
KECEELEEKNIKEFLQSFVHIVQMFINTS
IL-15 mature polypeptide:
NWVNVISDLKKIEDLIQSMHIDATLYTESDVHPSCKVTAMKCFLLELQVISLESGDASIHDTVENL
IILANNSLSSNGNVTESGCKECEELEEKNIKEFLQSFVHIVQMFINTS

[0445] The term “IL-15” or “IL-15 polypeptide” as used herein refers to any interleukin-15 (IL-15) protein, or a functional fragment or variant thereof. The term encompasses any native IL-15 from any vertebrate source, including mammals such as primates (e.g., humans) and rodents (e.g., rats and mice). The term encompasses unprocessed IL-15 (e.g., a full length, precursor form of IL-15 that consists of amino acid residues 1-162) as well as any form of IL-15 that results from processing in the cell (e.g., a mature form of IL-15 that consists of amino acid residues 49-162). As such, the term encompasses a protein encoded by the amino acid sequence of SEQ ID NO:224 as shown in the IL-15 Cytokine Moieties table below, as well as sequence variants thereof. The term also encompasses naturally occurring variants of IL-15. The term also encompasses non-naturally occurring variants of IL-15, such as truncations, deletions, forms where IL-15 is linked to another molecule, and variants caused by at least one amino acid change to the amino acid sequence (e.g., by substitution, addition, or deletion). In some aspects, the variants or homologs have at least 90%, 95%, 96%, 97%, 98%, 99% or 100% amino acid sequence identity across the whole sequence or a portion of the sequence (e.g., a 50, 100, or 114 continuous amino acid portion) compared to a naturally occurring IL-15 polypeptide, such as an IL-15 polypeptide encoded by the amino acid sequence of SEQ ID NO: 223 or 224 as shown in the IL-15 Cytokine Moieties table below. As such, the term “IL-15” or “IL-15 polypeptide” includes an IL-15 protein comprising the amino acid sequence of SEQ ID NO: 223 or 224 as shown in the IL-15 Cytokine Moieties table below, including variants thereof, such as variants created by one or more amino acid substitutions to the amino acid sequence of SEQ ID NO: 223 or 224 as shown in the IL-15 Cytokine Moieties table below.

[0446] “Functional fragments” of an IL-15 cytokine comprise a portion of a full length cytokine protein which retains or has modified cytokine receptor binding capability (e.g., within at least 50%, 80%, 90%, 95%, 96%, 97%, 98%, 99% or 100% activity compared to the full length cytokine protein). Cytokine receptor binding capability can be shown, for example, by the capability of a cytokine to bind to the cytokine's cognate receptor or a component thereof (e.g., one or more chain(s) of a heterotrimeric receptor complex).

[0447] In some embodiments, the IL-15 cytokine or functional fragment thereof is any naturally occurring interleukin-2 (IL-15) protein or modified variant thereof capable of binding to an interleukin-2 receptor, particularly the IL-15Rα chain.

[0448] In some embodiments, the IL-15 cytokine or fragment thereof comprises SEQ ID NO: 224 as shown in the IL-15 Cytokine Moieties table below or a functional fragment thereof.

[0449] In some embodiments, the IL-15 cytokine or functional fragment thereof comprises an amino acid sequence of SEQ ID NO: 224 as shown in the IL-15 Cytokine Moieties table below.

[0450] In some embodiments, the IL-5 cytokine or functional fragment thereof comprises an amino acid sequence having at least one amino acid modification as compared to the amino acid sequence of SEQ ID NO: 224 as shown in the IL-15 Cytokine Moieties table below. Each of the at least one amino acid modifications can be any amino acid modification, such as a substitution, insertion, or deletion. In some embodiments, the IL-15 cytokine or functional fragment thereof comprises an amino acid sequence having at least 1, at least 2, at least 3, at least 4, at least 5, at least 6, at least 7, at least 8, at least 9, or at least 10 amino acid substitutions as compared to the amino acid sequence of SEQ ID NO: 224 as shown in the IL-15 Cytokine Moieties table below. In some embodiments, the IL-15 cytokine or functional fragment thereof comprises an amino acid sequence having at least 5 amino acid substitutions as compared to the amino acid sequence of SEQ ID NO: 224 as shown in the IL-15 Cytokine Moieties table below. In some embodiments, the IL-cytokine or functional fragment thereof comprises an amino acid sequence having about or at least about 85%, 86%, 87%, 88%, 89%, 90%, 91%, 92%, 93%, 94%, 95%, 96%, 97%, 98%, or 99% sequence identity to the amino acid sequence of SEQ ID NO: 224 as shown in the IL-15 Cytokine Moieties table below.

[0451] In some embodiments, the IL-15 cytokine or functional fragment thereof comprises an amino acid sequence having one or more amino acid substitutions as compared to the amino acid sequence of SEQ ID NO: 224 as shown in the IL-15 Cytokine Moieties table below.

[0452] In some embodiments, the IL-15 cytokine or functional fragment thereof comprises an amino acid sequence having one or more amino acid substitutions at positions D22, E46, E53 as compared to the amino acid sequence of SEQ ID NO: 224 as shown in the IL-15 Cytokine Moieties table below. In some embodiments, the IL-15 cytokine or functional fragment thereof comprises an amino acid sequence having one or more amino acid substitutions at positions D22, E46, E53, N71, N79, N112 as compared to the amino acid sequence of SEQ ID NO: 224 as shown in the IL-15 Cytokine Moieties table below.

[0453] In some embodiments, the IL-15 cytokine or functional fragment thereof comprises an amino acid sequence having an amino acid substitution at position D22 as compared to the amino acid sequence of SEQ ID NO: 224 as shown in the IL-15 Cytokine Moieties table below.

[0454] In some embodiments, the IL-15 cytokine or functional fragment thereof comprises an amino acid sequence having an amino acid substitution at position E46 as compared to the amino acid sequence of SEQ ID NO: 224 as shown in the IL-15 Cytokine Moieties table below.

[0455] In some embodiments, the IL-15 cytokine or functional fragment thereof comprises an amino acid sequence having an amino acid substitution at position E53 as compared to the amino acid sequence of SEQ ID NO: 224 as shown in the IL-15 Cytokine Moieties table below.

[0456] In some embodiments, the IL-15 cytokine or functional fragment thereof comprises an amino acid sequence having an amino acid substitution at position N7I as compared to the amino acid sequence of SEQ ID NO: 224 as shown in the IL-15 Cytokine Moieties table below.

[0457] In some embodiments, the IL-15 cytokine or functional fragment thereof comprises an amino acid sequence having an amino acid substitution at position N79 as compared to the amino acid sequence of SEQ ID NO: 224 as shown in the IL-15 Cytokine Moieties table below.

[0458] In some embodiments, the IL-15 cytokine or functional fragment thereof comprises an amino acid sequence having an amino acid substitution at position N112 as compared to the amino acid sequence of SEQ ID NO: 224 as shown in the IL-15 Cytokine Moieties table below.

[0459] In some embodiments, the IL-15 cytokine or functional fragment thereof comprises an amino acid sequence having amino acid substitutions at positions E46 and E53 as compared to the amino acid sequence of SEQ ID NO: 224 as shown in the IL-15 Cytokine Moieties table below.

[0460] In some embodiments, the IL-15 cytokine or functional fragment thereof comprises an amino acid sequence having an amino acid substitution at position N71 and N79 as compared to the amino acid sequence of SEQ ID NO: 224 as shown in the IL-15 Cytokine Moieties table below.

[0461] In some embodiments, the IL-15 cytokine or functional fragment thereof comprises an amino acid sequence having an amino acid substitution at position N71 and N112 as compared to the amino acid sequence of SEQ ID NO: 224 as shown in the IL-15 Cytokine Moieties table below.

[0462] In some embodiments, the IL-15 cytokine or functional fragment thereof comprises an amino acid sequence having an amino acid substitution at position N79 and N112 as compared to the amino acid sequence of SEQ ID NO: 224 as shown in the IL-15 Cytokine Moieties table below.

[0463] In some embodiments, the IL-15 cytokine or functional fragment thereof comprises an amino acid sequence having an amino acid substitution at position N71, N79 and N112 as compared to the amino acid sequence of SEQ ID NO: 224 as shown in the IL-15 Cytokine Moieties table below.

[0464] In some embodiments, the amino acid substitution at position D22 is D22A.

[0465] In some embodiments, the amino acid substitution at position E46 is E46A.

[0466] In some embodiments, the amino acid substitution at position E46 is E46R.

[0467] In some embodiments, the amino acid substitution at position E46 is E46S.

[0468] In some embodiments, the amino acid substitution at position E53 is E53A.

[0469] In some embodiments, the amino acid substitution at position E53 is E53R.

[0470] In some embodiments, the amino acid substitution at position E53 is E53S.

[0471] In some embodiments, the amino acid substitution at position N71 is N71Q.

[0472] In some embodiments, the amino acid substitution at position N79 is N79Q.

[0473] In some embodiments, the amino acid substitution at position N112 is N112Q.

[0474] In some embodiments, the IL-15 cytokine or functional fragment thereof comprises an amino acid sequence having an amino acid substitution D22A as compared to the amino acid sequence of SEQ ID NO: 224 as shown in the IL-15 Cytokine Moieties table below.

[0475] In some embodiments, the IL-15 cytokine or functional fragment thereof comprises an amino acid sequence having an amino acid substitution E46A as compared to the amino acid sequence of SEQ ID NO: 224 as shown in the IL-15 Cytokine Moieties table below.

[0476] In some embodiments, the IL-15 cytokine or functional fragment thereof comprises an amino acid sequence having amino acid substitutions E46A and E53A as compared to the amino acid sequence of SEQ ID NO: 224 as shown in the IL-15 Cytokine Moieties table below.

[0477] In some embodiments, the IL-15 cytokine or functional fragment thereof comprises an amino acid sequence having amino acid substitutions E46R and E53R as compared to the amino acid sequence of SEQ ID NO: 224 as shown in the IL-15 Cytokine Moieties table below.

[0478] In some embodiments, the IL-15 cytokine or functional fragment thereof comprises an amino acid sequence having amino acid substitutions E46S and E53S as compared to the amino acid sequence of SEQ ID NO: 224 as shown in the IL-15 Cytokine Moieties table below.

[0479] In some embodiments, the IL-15 cytokine or functional fragment thereof comprises an amino acid sequence having an amino acid substitution E53A as compared to the amino acid sequence of SEQ ID NO: 224 as shown in the IL-15 Cytokine Moieties table below.

[0480] In some embodiments, the IL-15 cytokine or functional fragment thereof comprises an amino acid sequence having an amino acid substitution N71Q as compared to the amino acid sequence of SEQ ID NO: 224 as shown in the IL-15 Cytokine Moieties table below.

[0481] In some embodiments, the IL-15 cytokine or functional fragment thereof comprises an amino acid sequence having an amino acid substitution N79Q as compared to the amino acid sequence of SEQ ID NO: 224 as shown in the IL-15 Cytokine Moieties table below.

[0482] In some embodiments, the IL-15 cytokine or functional fragment thereof comprises an amino acid sequence having an amino acid substitution N12Q as compared to the amino acid sequence of SEQ ID NO: 224 as shown in the IL-15 Cytokine Moieties table below.

[0483] In some embodiments, the IL-15 cytokine or functional fragment thereof comprises an amino acid sequence having an amino acid substitution N71Q and N79Q as compared to the amino acid sequence of SEQ ID NO: 224 as shown in the IL-15 Cytokine Moieties table below.

[0484] In some embodiments, the IL-15 cytokine or functional fragment thereof comprises an amino acid sequence having an amino acid substitution N71Q and N112Q as compared to the amino acid sequence of SEQ ID NO: 224 as shown in the IL-15 Cytokine Moieties table below.

[0485] In some embodiments, the IL-15 cytokine or functional fragment thereof comprises an amino acid sequence having an amino acid substitution N79Q and N112Q as compared to the amino acid sequence of SEQ ID NO: 224 as shown in the IL-15 Cytokine Moieties table below.

[0486] In some embodiments, the IL-15 cytokine or functional fragment thereof comprises an amino acid sequence having an amino acid substitution N71Q, N79Q and N112Q as compared to the amino acid sequence of SEQ ID NO: 224 as shown in the IL-15 Cytokine Moieties table below.

IL-15 Cytokine Moieties:

| | SEQ | | |
|---|---|---|---|
| Component | ID NO | Sequence | DC |
| hIL-15 | 223 | MRISKPHLRSISIQCYLCLLLNSHFLTEAGIHVFILGCFSAGLPKTEA | |
| (precursor) | | NWVN | |
| | | VISDLKKIEDLIQSMHIDATLYTESDVHPSCKVTAMKCFLLELQVIS | |
| | | LESGD | |
| | | ASIHDTVENLIILANNSLSSNGNVTESGCKECEELEEKNIKEFLQSFV | |
| | | HIVQM | |
| | | FINTS | |
| hIL15 | 224 | NWVNVISDLKKIEDLIQSMHIDATLYTESDVHPSCKVTAMKCFLLE | AK401 |
| | | LQVISL | AK402 |
| | | ESGDASIHDTVENLIILANNSLSSNGNVTESGCKECEELEEKNIKEF | AK403 |
| | | LQSFVH | AK481 |
| | | IVQMFINTS | AK482 |
| | | | AK483 |
| | | | AK478 |
| | | | AK479 |
| | | | AK480 |
| | | | AK242 |
| | | | AK243 |
| | | | AK247 |
| | | | AK248 |
| | | | AK245 |
| | | | AK250 |
| | | | AK419 |
| | | | AK246 |
| | | | AK251 |
| | | | AK420 |
| | | | AK421 |
| | | | AK457 |
| | | | AK399 |
| | | | AK404 |
| | | | AK405 |
| | | | AK400 |
| | | | AK244 |
| | | | AK249 |
| | | | AK418 |
| | | | AK507 |
| | | | AK564 |
| hIL15 | 225 | NWVNVISDLKKIEDLIQSMHIAATLYTESDVHPSCKVTAMKCFLLE | AK458 |
| (D22A) | | LQVISLESGD | |
| | | ASIHDTVENLIILANNSLSSNGNVTESGCKECEELEEKNIKEFLQSFV | |
| | | HIVQMFINTS | |
| hIL15 | 226 | NWVNVISDLKKIEDLIQSMHIDATLYTESDVHPSCKVTAMKCFLLA | AK459 |
| (E46A) | | LQVISLESGDA | |
| | | SIHDTVENLIILANNSLSSNGNVTESGCKECEELEEKNIKEFLQSFVH | |
| | | IVQMFINTS | |
| hIL15 | 227 | NWVNVISDIKKIEDLIQSMHIDATLYTESDVHPSCKVTAMKCFLLA | AK461 |
| (E46A, E53A) | | LQVISLASGD | AK527 |
| | | ASIHDTVENLIILANNSLSSNGNVTESGCKECEELEEKNIKEFLQSFV | AK506 |
| | | HIVQMFINTS | |
| hL15 | 228 | NWVNVISDLKKIEDLIQSMHIDATLYTESDVHPSCKVTAMKCFLLR | not |
| (E46R, E53R) | | LQVISLRSGD | named |
| | | ASIHDTVENLIILANNSLSSNGNVTESGCKECEELEEKNIKEFLQSFV | yet- |
| | | HIVQMFINTS | 2 |
| hIL15 | 229 | NWVNVISDLKKIEDLIQSMHIDATLYTESDVHPSCKVTAMKCFLLS | not |
| (E46S, E53S) | | LQVISLSSGD | named |
| | | ASTHDTVENLIILANNSLSSNGNVTESGCKECEELEEKNIKEFLQSFV | yet- |
| | | HIVQMFINTS | 1 |
| hIL15 | 230 | NWVNVISDLKKIEDLIQSMHIDATLYTESDVHPSCKVTAMKCFLLE | AK460 |
| (E53A) | | LQVISLASGD | |
| | | ASIHDTVENLIILANNSLSSNGNVTESGCKECEELEEKNIKEFLQSFV | |
| | | HIVQMFINTS | |
| hIL15 | 231 | NWVNVISDLKKIEDLIQS | not |
| (N-ter) | | | named |
| | | | yet- |
| | | | 3 |
| | | | not |
| | | | named |
| | | | yet- |
| | | | 4 |
| hIL15 | 232 | KVTAMKCFLLELQVISLESGDASIHDTVENLILANNSLSSNGNVTE | not |
| (C-ter) | | SGCKECEELEE | named |
| | | KNIKEFLQSFVHIVQMFINTS | yet- |
| | | | 3 |
| | | | not |
| | | | named |
| | | | yet- |
| | | | 4 |
| IL-15 | 233 | NWVNVISDLKKIEDLIQSMHIDATLYTESDVHPSCKVTAMKCFLLE | AK595 |
| (N71Q) | | LQVISLESGD | AK596 |
| | | ASHIDTVENLIILAQNSLSSNGNVTESGCKECEELEEKNIKEFLQSFV | |
| | | HIVQMFNTS | |
| hIL-15 | 234 | NWVNVISDLKKIEDLIQSMHIDATLYTESDVHPSCKVTAMKCFLLE | AK901 |
| (N79Q) | | LQVISLESGD | AK907 |
| | | ASIHDTVENLIILANNSLSSNGQVTESGCKECEELEEKNIKEFLQSFV | |
| | | HIVQMFINTS | |
| hIL-15 | 235 | NWVNVISDLKKIEDLIQSMHIDATLYTESDVHPSCKVTAMKCFLLE | AK900 |
| (N112Q) | | LQVISLESGD | AK906 |
| | | ASIHDTVLNLITLANNSLSSNGNVTESGCKECEELEEKNIKEFLQSFV | |
| | | HIVQMFIQTS | |
| hIL-15 | 236 | NWVNVISDLKKIEDLIQSMHIDATLYTESDVHPSCKVTAMKCFLLE | AK904 |
| (N71Q, | | LQVISLESGD | AK910 |
| N79Q) | | ASIHDTVENLITLAQNSLSSNGQVTESGCKECEELEEKNIKEFLQSFV | AK929 |
| | | HIVQMFINTS | AK935 |
| | | | AK931 |
| | | | AK937 |
| | | | AK934 |
| | | | AK940 |
| | | | AK933 |
| | | | Ak939 |
| hIL-15 | 237 | NWVNVISDLKKIEDLIQSMHIDATLYTESDVHPSCKVTAMKCFLLE | AK903 |
| (N71Q, | | LQVISLLSGD | AK909 |
| N112Q) | | ASIHDTVENLIILAQNSLSSNGNVTESGCKECEELEEKNIKEFLQSFV | |
| | | HIVQMFIQTS | |
| hIL-15 | 238 | NWVNVISDLKKIEDLIQSMHIDATLYTESDVHPSCKVTAMKCFLLE | AK902 |
| (N79Q, | | LQVISLESGD | AK908 |
| N112Q) | | ASIHDTVENLIILANNSLSSNGQVTESGCKECEELEEKNIKEFLQSFV | |
| | | HIVQMFIQTS | |
| hIL-15 | 239 | NWVNVISDLKKIEDLIQSMHIDATLYTESDVHPSCKVTAMKCFLLE | AK905 |
| (N71Q, | | LQVISLESGD | AK911 |
| N79Q, N112Q) | | ASIHDTVENLIILAQNSLSSNGQVTESGCKECEELEEKNIKEFLQSFV | |
| | | HIVQMFIQTS | |

[0487] In some embodiments, the IL-15 cytokine moiety has an amino acid sequence as shown by one of the sequences in the table above.

[0488] In some embodiments, an additional mutation may be included in any of the sequences above at position N71. In some embodiments, the mutation is N71A, N71R, N71W, N71F, N71P, N71M, N71L, N71T, N71S, or N71Y.

[0489] In some embodiments, an additional mutation may be included in any of the sequences above at position S73. In some embodiments, the mutation is S73A, S73W, S73V, or S73M.

[0490] In some embodiments, an additional mutation may be included in any of the sequences above at one or more of amino acid positions N72, N79, V80, T81, and N112. In some embodiments, one or more additional mutations selected from N72A, N79A, V80A, T81A and N112R may be included in any of the sequences above.

[0491] In some embodiments, an additional mutation may be included in any of the sequences above at one or more of amino acid positions N72, S73, N79, V80, T81, and N112. In some embodiments, one or more additional mutations N72A, S73A, N79A, V80A, T81A, and N112 may be included in any of the sequences above.

[0492] In some embodiments, the IL-15 cytokine or functional fragment thereof has one or more amino acid residues e.g. residues 1-3 s removed as compared to the amino acid sequence of the mature IL-15 of SEQ ID 224 as shown in the IL-15 Cytokine Moieties table above, for the purpose of removing an O-glycosylation site. In some embodiments, the IL-15 cytokine or functional fragment thereof has one or more amino acid residues substituted as compared to the amino acid sequence of the mature IL-15 of SEQ ID 224 as shown in the IL-15 Cytokine Moieties table above, for the purpose of removing an O-glycosylation site. In some embodiments, the IL-15 cytokine or functional fragment thereof has one or more amino acid residues inserted, e.g. in the region of residues 1-3, as compared to the amino acid sequence of the mature IL-15 of SEQ ID 224 as shown in the IL-15 Cytokine Moieties table above, for the purpose of removing an O-glycosylation site. In some embodiments, the IL-15 cytokine or functional fragment thereof does not have an O-glycosylation site within residues 1-3.

[0493] In some embodiments, the masked IL-15 cytokine further comprises a domain comprising an IL-15Rα subunit or a functional fragment thereof (‘IL-15Rα domain’), incorporating an ‘IL-15Rα domain’ into a masked IL-15 cytokine construct has been demonstrated to increase the potency of said cytokine in activating CD8 T cell and NK cells.

[0494] The IL-15Rα subunit (also referred to as CD215) is structurally similar to IL-2Rα; the ectodomain of IL-15Rα consists of a single protein-binding Sushi domain, a membrane-proximal proline-threonine-rich (PT) region, and a linker/hinge region that connects the sushi domain and the PT region. The IL-15Rα subunit specifically binds IL-15 with very high affinity and is capable of binding IL-15 independently of the β and γ subunits.

[0495] Interleukin (IL)-15 is a cytokine that acts on a wide range of cell types but is most crucial for the development, homeostasis, and function of a specific group of immune cells that includes CD8 T cells, NK cells. NKT cells, and CD8aa intraepithelial lymphocytes. IL-15 signals are transmitted through the IL-2/15Rβ and common γ (γC) chains; however, it is the delivery of IL-15 to these signalling components that is quite unique. As opposed to other cytokines that are secreted, IL-15 primarily exists bound to the high affinity IL-15Rα. When IL-15/IL-15Rα complexes are shuttled to the cell surface, they can stimulate opposing cells through the β/γC receptor complex. This novel mechanism of IL-15 delivery has been called trans-presentation (S. W. Stonier and K. S. Schluns, ‘Trans-presentation: a novel mechanism regulating IL-15 delivery and responses’, Immunol Lett Jan. 4 2010; 127(2): 85-92, the contents of which is incorporated herein by reference).

[0496] The IL-15Rα subunit comprises a conserved protein binding motif called a sushi domain. The sushi domain sIL-15Rα, which comprises amino acids 31 to 95 of the IL-15Rα subunit, is responsible for interacting with IL-15 and is essential for IL-15/IL-15Rα function (Wei X el al. ‘The Sushi Domain of Soluble IL-15 Receptor α Is Essential for Binding IL-15 and Inhibiting Inflammatory and Allogenic Responses In Vitro and In Vivo’, J Immunol Jul. 1, 2001; 167(1) 277-282, the contents of which is incorporated herein by reference).

[0497] The sequence of the wild-type IL-15Rα subunit is shown below, along with a breakdown of the main domains:

```
                10 20 30 40
MAPRRARGCR TLGLPALLLL LLLRPPATRG ITCPPPMSVE
                50 60 70 80
HADIWVKSYS LYSRERYICN SGFKRKAGTS SLTECVLNKA
                90 100 110 120
TNVAHWTTPS LKCIRDPALV HQRPAPPSTV TTAGVTPQPE
              130 140 150 160
SLSPSKGEPA ASSPSSNNTA ATTAAIVPGS QLMPSKSPST
              170 180 190 200
GTTEISSHES SHGTPSQTTA KNWELTASAS HQPPGVYPQG
              210 220 230 240
HSDTTVAIST STVLLCGLSA VSLLACYLKS RQTPPLASVE
              250 260
MEAMEALPVT WGTSSRDEDL ENCSHHL
<sp|Q13261|1-30 (signal peptide
MAPRRARGCRTLGLPALLLLLLLRPPATRG
<sp|Q13261|31-205 (Extracellular domain) [Note:
31-95 is canonical “Sushi domain”]
ITCPPPMSVEHADIWVKSYSLYSRERYICNSGFKRKAGTSSLTECVL
NKATNVAHWTTPSLKCIRDPALVHQRPAPPSTVTTAGVTPQPESLSP
SGKEPAASSPSSNNTAATTAAIVPGS
<sp|Q13261|206-225 (Transmembrane domain)
VAISTSTVLLCGLSAVSLLACYL
<sp|Q13261|229-267 (Cytoplasmic domain)
KSRQTPPLASVEMEAMEALPVTWGTSSRDEDLENCSHHL
```

[0498] The ‘IL-15Rα domain’ herein can comprise the sequence of the extracellular domain of the wild-type IL-15Rα subunit or a variant thereof, such as the sequence of the extracellular domain of the wild-type IL-15Rα subunit with one or more e.g. 1, 2, 3 or 4 amino acid substitutions.

[0499] The ‘IL-15Rα domain’ herein can comprise the sequence of the wild-type sushi domain sIL-15Rα or a variant thereof, such as the sequence of the wild-type sushi domain sIL-15Rα with one or more e.g. 1, 2, 3 or 4 amino acid substitutions.

[0500] The ‘IL-15Rα domain’ herein can consist of the sequence of the wild-type sushi domain sIL-15Rα or a variant thereof, such as the sequence of the wild-type sushi domain sIL-15Rα with one or more e.g. 1, 2, 3 or 4 amino acid substitutions.

[0501] In some embodiments, the IL-15Rα domain comprises an amino acid substitution at position R26. In some embodiments, the IL-15Rα domain comprises amino acid substitution R26N. In some embodiments, the IL-15Rα domain comprises amino acid substitution R26S. In some embodiments, the IL-15Rα domain comprises an amino acid substitution at position R35. In some embodiments, the IL-15Rα domain comprises amino acid substitution R35Q. In some embodiments, the IL-15Rα domain comprises amino acid substitution R35S. In some embodiments, the IL-15Rα domain comprises an amino acid substitution at positions R26 and R35. In some embodiments, the IL-15Rα domain comprises amino acid substitutions R26S or R26N, and R35Q or R35S. In some embodiments, the IL-15Rα domain comprises amino acid substitutions R26N and R35Q.

[0502] Exemplary sequences for the IL-15Rα domain are shown below:

| Component | Sequence |
|---|---|
| hCD215 | ITCPPPMSVEHADIWVKSYSLYSRERYICNSGFKRKAGTSSLTECVLN |
| | KATNVAHWTTPSLKCIRDPALVHQRPAPPSTVTTAGVTPQPESLSP |
| | SGKEPAASSPSSNNTAATTAAIVPGSQLMPSKSPSTGTTEISSHESSH |
| | GTPSQTTAKNWELTASASHQPPGVYPQGHSDTT |
| hCD215(1to66) | ITCPPPMSVEHADIWVKSYSLYSRERYICNSGFKRKAGTSSLTECVLNK |
| | ATNVAHWTTPSLKCIRD |
| hCD215(1to66) | ITCPPPMSVEHADIWVKSYSLYSRENYICNSGFKRKAGTSSLTECVLNK |
| R26N | ATNVAHWTTPSLKCIRD |
| hCD215(1to66) | ITCPPPMSVEHADIWVKSYSLYSRERYICNSGFKQKAGTSSLTECVLNK |
| R35Q | ATNVAHWTTPSLKCIRD |
| hCD215(1to66) | iTCPPPMSVEHADIWVKSYSLYSRESYICNSGFKRKAGTSSLTECVLNK |
| R26S | ATNVAHWTTPSLKCIRD |
| hCD215(1to66) | ITCPPPMSVEHADIWVKSYSLYSRERYICNSGFKSKAGTSSLTECVLNK |
| R35S | ATNVAHWTTPSLKCIRD |
| hCD215(1to66) | ITCPPPMSVEHADIWVKSYSLYSRENYICNSGFKQKAGTSSLTECVLNK |
| R26N; R35Q | ATNVAHWTTPSLKCIRD |
| hCD215(Sushi) | ITCPPPMSVEHADIWVKSYSLYSRERYICNSGFKRKAGTSSLTECVLNKATN |
| | VAHWTTPSLKCIRDPALVHQRPAPP |
| hCD215(Truncated) | ITCPPPMSVEHADIWVKSYSLYSRERYICNSGFKRKAGTSSLTECVLNKATNV |
| | AHWTTPSLKCIRDPALVHQRPAPPSTVTTAGVTPQPESLSPSGKEPAAS |

[0503] In some embodiments, the IL-15Rα domain has an amino acid sequence as shown by one of the sequences in the table above.

### (b) IL-15 Masking Moieties

[0504] Provided herein is a masking moiety for use in masking a therapeutic moiety comprising an IL-15 cytokine or functional fragment thereof.

[0505] It will be understood that the masking moiety is cleaved from the masked cytokine to form the cleavage product thereof. The masking moiety masks the IL-15 cytokine or functional fragment thereof in the masked cytokine thereby reducing or preventing binding of the IL-cytokine or functional fragment thereof to its cognate receptor. In some embodiments, the masking moiety reduces or prevents binding of the IL-cytokine or functional fragment thereof to IL-15Rα. In some embodiments, the masking moiety as provided herein refers to a moiety capable of binding to, or otherwise exhibiting an affinity for the IL-15 cytokine or functional fragment thereof, such as an anti-IL-15 antibody or IL-15 cognate receptor protein. Methods for determining the extent of binding of a protein (e.g., cytokine) to a cognate protein (e.g., cytokine receptor) are well known in the art.

[0506] In some embodiments, the masking moiety comprises an IL-15 cytokine receptor, or a subunit or functional fragment thereof.

[0507] In some embodiments, the masking moiety comprises IL-15Rβ (also referred to as CD122) or a fragment, portion, or variant thereof that retains or otherwise demonstrates an affinity to IL-15.

[0508] The wild type sequence of IL-15Rβ is shown in SEQ ID NO: 240 in the IL-15 Masking Moities table below.

[0509] In some embodiments, the masking moiety comprises the amino acid sequence of SEQ ID NO: 240 in the IL-15 Masking Moieties table below. In some embodiments, the masking moiety comprises an amino acid sequence having about or at least about 85%, 86%, 87%, 88%, 89%, 90%, 91%, 92%, 93%, 94%, 95%, 96%, 97%, 98%, or 99% sequence identity to the amino acid sequence of SEQ ID NO: 240 in the IL-15 Masking Moieties table below. In some embodiments, the masking moiety comprises an amino acid sequence having the amino acid sequence of SEQ ID NO: 240 in the IL-15 Masking Moieties table below with one to four amino acid substitutions. In some embodiments, the masking moiety comprises an amino acid sequence having the amino acid sequence of SEQ ID NO: 240 in the IL-15 Masking Moieties table below with one or two amino acid substitutions.

[0510] In some embodiments, the masking moiety comprises IL-15Rβ (or a functional fragment, portion, or variant thereof, where the IL-15Rβ has an amino acid substitution at position C122.

[0511] In some embodiments, the masking moiety comprises IL-15Rβ (or a functional fragment, portion, or variant thereof), where the IL-15Rβ has amino acid substitution C122S.

[0512] In some embodiments, the IL-15Rβ or a fragment, portion or variant thereof has an amino acid substitution at position C122 as compared to IL-15Rβ of SEQ ID NO: 240 in the IL-15 Masking Moieties table below.

[0513] In some embodiments, the IL-15Rβ or a fragment, portion or variant thereof has mutation C122S at amino acid position 122 as compared to IL-15β of SEQ ID NO: 240 in the IL-15 Masking Moieties table below.

[0514] In some embodiments, the masking moiety comprises an amino acid sequence of SEQ ID NO: 240 in the IL-15 Masking Moieties table below with a C122 mutation.

[0515] In some embodiments, the masking moiety comprises an amino acid sequence of SEQ ID NO: 240 in the IL-15 Masking Moieties table below with a C122S mutation.

[0516] In some embodiments, the masking moiety comprises IL-15Rβ (or a functional fragment, portion, or variant thereof), where the IL-15Rβ has an amino acid substitution at position C168.

[0517] In some embodiments, the masking moiety comprises IL-15Rβ (or a functional fragment, portion, or variant thereof), where the IL-15Rβ has amino acid substitution C168S.

[0518] In some embodiments, the IL-15Rβ or a fragment, portion or variant thereof has mutation at amino acid position C168 as compared to IL-15Rβ of SEQ ID NO: 240 in the IL-15 Masking Moieties table below.

[0519] In some embodiments, the IL-15Rβ or a fragment, portion or variant thereof has mutation C168S at amino acid position 168 as compared to IL-15Rβ of SEQ ID NO: 240 in the IL-15 Masking Moieties table below.

[0520] In some embodiments, the masking moiety comprises an amino acid sequence of SEQ ID NO: 240 in the IL-15 Masking Moieties table below, with a C168 mutation.

[0521] In some embodiments, the masking moiety comprises an amino acid sequence of SEQ ID NO: 240 in the IL-15 Masking Moieties table below, with a C168S mutation.

[0522] In some embodiments, the IL-15Rβ or a fragment, portion or variant thereof has mutation at amino acid positions C122 and C168 as compared to IL-15Rβ of SEQ ID NO: 240 in the IL-15 Masking Moieties table below.

[0523] In some embodiments, the IL-15Rβ or a fragment, portion or variant thereof has mutation C122S and C168S as compared to IL-15Rβ of SEQ ID NO: 240 in the IL-15 Masking Moieties table below.

[0524] In some embodiments, the masking moiety comprises an amino acid sequence of SEQ ID NO: 241 in the IL-15 Masking Moieties table below.

TABLE
IL-15 Masking Moieties:

| | | SEQ | | |
|---|---|---|---|---|
| | | ID | | |
| Component | | NO | Sequence | DC |
| Masking | hCD122 | 240 | AVNGTSQFTCFYNSRANISCVWSQ | AK247 |
| moiety | | | DGALQDTSCQVHAWPDRRRWNQTC | AK248 |
| (MM) | | | ELLPVSQASWACNLILGAPDSQKL | AK421 |
| | | | TTVDIVTLRVLCREGVRWRVMAIQ | AK457 |
| | | | DFKPFENLRLMAPISLQVVHVETH | AK249 |
| | | | RCNISWEISQASHYFERHLEFEAR | AK418 |
| | | | TLSPGHTWEEAPLLTLKQKQEWIC | AK250 |
| | | | LETLTPDTQYEFQVRVKPLQGEFT | AK251 |
| | | | TWSPWSQPLAFRTKPAALGKD | AK399 |
| | | | | AK400 |
| | | | | AK404 |
| | | | | AK405 |
| | | | | AK419 |
| | | | | AK420 |
| | | | | AK401 |
| | | | | AK402 |
| | | | | AK403 |
| | | | | AK458 |
| | | | | AK459 |
| | | | | AK460 |
| | | | | AK461 |
| | | | | AK478 |
| | | | | AK479 |
| | | | | AK480 |
| | | | | AK481 |
| | | | | AK482 |
| | | | | AK483 |
| | | | | AK527 |
| | | | | not |
| | | | | named |
| | | | | yet-3 |
| | | | | not |
| | | | | named |
| | | | | yet-4 |
| | hCD122 | 241 | AVNGTSQFTCFYNSRANISCVWSQ | AK564 |
| | C122S, | | DGALQDTSCQVHAWPDRRRWNQTC | AK596 |
| | C168S) | | ELLPVSQASWACNLILGAPDSQKL | AK900 |
| | | | TTVDIVTLRVLCREGVRWRVMAIQ | AK901 |
| | | | DFKPFENLRLMAPISLQVVHVETH | AK902 |
| | | | RSNISWEISQASHYFERHLEFEAR | AK903 |
| | | | TLSPGHTWEEAPLLTLKQKQEWIS | AK904 |
| | | | LETLTPDTQYEFQVRVKPLQGEFT | AK905 |
| | | | TWSPWSQPLAFRTKPAALGKD | AK906 |
| | | | | AK907 |
| | | | | AK908 |
| | | | | AK909 |
| | | | | AK910 |
| | | | | AK911 |
| | | | | AK929 |
| | | | | AK935 |
| | | | | AK931 |
| | | | | AK937 |
| | | | | AK934 |
| | | | | AK940 |
| | | | | AK933 |
| | | | | AK939 |

[0525] In some embodiments, the IL-15 masking moiety has an amino acid sequence as shown by one of the sequences in the table above.

[0526] 1.2 Non-Cleavable Peptide Linkers

[0527] Provided herein are non-cleavable peptide linkers for use in drug construct or cleavage product thereof as described herein. A non-cleavable linker as provided herein refers to a peptide of two more amino acids that is used to link two functional components together in the masked cytokines described herein.

[0528] The masked cytokine comprises a first linker and a second linker, where at least the first linker or the second linker comprises a proteolytically cleavable peptide.

[0529] In some embodiments, the second linker comprises a proteolytically cleavable peptide (linker herein referred to as a ‘proteolytically cleavable linker’) and the first linker does not comprise a proteolytically cleavable peptide (linker herein referred to as a ‘non-cleavable linker’). This arrangement is described herein as ‘Structure A’. In In some embodiments, the first polypeptide chain comprises formula:

N′HL1-non-cleavable L1-MM C′

and the second polypeptide chain comprises formula:

N′HL2-cleavable L2-C C′

[0530] In some embodiments, the first linker comprises a proteolytically cleavable peptide (linker herein referred to as a ‘proteolytically cleavable linker’ or‘cleavable linker’) and the second linker does not comprise a proteolytically cleavable peptide (linker herein referred to as a ‘non-cleavable linker’). This arrangement is described herein as ‘Structure H’. In some embodiments, the first polypeptide chain comprises formula:

N′HL1-cleavable LM-MM C′

and the second polypeptide chain comprises formula:

N′HL2-non-cleavable L2-C C′

[0531] The non-cleavable linkers and cleavable linkers of some embodiments are described in more detail below.

[0532] In some embodiments, the non-cleavable linker is between 3 and 25 amino acids in length.

[0533] In some embodiments, the non-cleavable linker is between 3 and 18 amino acids in length.

[0534] In some embodiments, the non-cleavable linker is between 3 and 8 amino acids in length.

[0535] In some embodiments, the non-cleavable linker is between 4 and 6 amino acids in length.

[0536] In some embodiments, the non-cleavable linker is rich in amino acid residues G, S and P.

[0537] In some embodiments, the non-cleavable linker only includes amino acid residue types selected from the group consisting of G, S and P.

[0538] In some embodiments, the non-cleavable linker includes a ‘GS’ repeat.

[0539] In some embodiments, the non-cleavable linker includes an N′ terminal ‘P’ residue.

[0540] In some embodiments, the non-cleavable linker comprises an amino acid sequence PGSGS (SEQ ID NO: 14).

[0541] In some embodiments, the non-cleavable linker consists of the amino acid sequence PGSGS.

[0542] In some embodiments, the non-cleavable linker comprises an amino acid sequence GGSSPPGGGSSGGGSGP (SEQ ID NO: 23).

[0543] In some embodiments, the non-cleavable linker consists of the amino acid sequence GGSSPPGGGSSGGGSGP.

GGSSPPGGGSSGGGSGP.

[0544] In some embodiments, wherein the second linker is a procolytically cleavable linker and the first linker is a non-cleavable linker, the non-cleavable linker comprises PGSGS. In some embodiments, wherein the second linker is a proteolytically cleavable linker and the first linker is a non-cleavable linker, the non-cleavable linker consists of the amino acid sequence PGSGS.

[0545] In some embodiments, wherein the first linker is a proteolytically cleavable linker and the second linker is a non-cleavable linker, the non-cleavable linker comprises GGSSPPCGGGSSGGGSGP. In some embodiments, wherein the first linker is a proteolytically cleavable linker and the second linker is a non-cleavable linker, the non-cleavable linker consists of the amino acid sequence GGSSPPGGGSSGGGSGP.

[0546] In some embodiments, wherein the second linker is a proteolytically cleavable linker and the first linker is a non-cleavable linker, the non-cleavable linker is between 3 and 8 amino acids in length. In some embodiments, the non-cleavable linker is between 4 and 6 amino acids in length. In some embodiments, the non-cleavable linker comprises an amino acid sequence as shown in SEQ ID NO: 14 (PGSGS).

[0547] In some embodiments, wherein the first linker is a proteolytically cleavable linker and the second linker is a non-cleavable linker, the non-cleavable linker is between 3 and 18 amino acids in length. In some embodiments, wherein the first linker is a proteolytically cleavable linker and the second linker is a non-cleavable linker, the non-cleavable linker is between 10 and 18 amino acids in length. In some embodiments, the non-cleavable linker comprises an amino acid sequence as shown in SEQ ID NO: 23 (GGSSPPGGGSSGGGSGP).

[0548] In some embodiments, it is desirable for the first and second polypeptide chains to be of the same or a similar length to facilitate the first half life extension domain associating with the second half life extension domain and the masking moiety masking the cytokine or functional fragment thereof in the assembled construct. As such where the masking moiety is a shorter amino acid sequence than the cytokine or functional fragment thereof, the difference in length may be compensated fully or in part by using a longer linker L1.

[0549] In some embodiments, the first polypeptide chain comprises formula:

N′HL1-non-cleavable L1-MM C′

and the second polypeptide chain comprises formula:

N′HL2-SD1-CP-SD2-C C′

[0550] In some embodiments, the first polypeptide chain comprises formula:

N′HL1-SD1-CP-SD2-MM C′

and the second polypeptide chain comprises formula:

N′HL2-non-cleavable L2-C C′

[0551] Linker combinations disclosed in exemplary AK molecules may be used with any cytokine moiety disclosed herein. Linker combinations disclosed in exemplary AK molecules may be used with any masking moiety disclosed herein. Linker combinations disclosed in exemplary AK molecules may be used with any half-life extension moieties. In other words, the linker disclosed in exemplary AK molecules may be used in combinations with any cytokine moiety disclosed herein, masking moiety disclosed herein and/or half-life extension moiety disclosed herein.

### 2. Cleavage Product

[0552] Provided herein is a cleavage product capable comprising an active therapeutic moiety, preparable by proteolytic cleavage of the proteolytically cleavable linker in the polypeptide drug constructs as described anywhere herein.

[0553] Provided herein is a cleavage product of a ‘heterodimeric’ masked cytokine described anywhere herein.

[0554] The masked cytokines described herein comprise a cleavable linker. Upon proteolytic cleavage of the cleavable linker at the cleavage site, a cleavage product comprising the cytokine moiety is formed. The cytokine moiety in the cleavage product is activated since it is no longer masked by the masking moiety. The cytokine moiety in the cleavage product is therefore capable of binding to the target protein.

[0555] The tumor cell environment is complex and can comprise multiple different proteases. As such, the precise site at which a given cleavable peptide within a masked cytokine will be cleaved in the tumor cell environment may vary between tumor types, between patients with the same tumor type and even between cleavage products formed in the same tumor. Moreover, even after cleavage, further modification of the initial cleavage product, e.g. by removal of one or two terminal amino acids, may occur by the further action of proteases in the tumor cell environment. A distribution of cleavage products can thus be expected to form in the tumor cell environment of a patient following administration of a masked cytokine as described herein.

[0556] It will be understood that a cleavage site as referred to herein refers to a site between two specific amino acid residues within the cleavable peptide that are a target for a protease known to be associated with a tumor cell environment. In this sense, there may be more than one cleavage site present in a cleavable peptide as described herein where different proteases cleave the cleavable peptide at different cleavage sites. It is also possible that more than one protease may act on the same cleavage site within a cleavable peptide. Discussion of protease cleavage sites can be found in the art.

[0557] Thus, the cleavable peptides disclosed herein may be cleaved by one or more proteases. Provided herein is a cleavage product comprising a cytokine moiety capable of binding to it cognate receptor, preparable by proteolytic cleavage of the proteolytically cleavable linker in a masked cytokine as described anywhere herein.

[0558] Also provided herein is a distribution of cleavage products obtained or obtainable from a single structure of a masked cytokine, where each cleavage product within the distribution of cleavage products (i) is capable of binding to the target protein and (ii) comprises a cytokine (e.g. IL-2. IL-15 or IL-12 cytokine) moiety as defined anywhere herein.

[0559] Also provided herein is a cleavage product of a masked cytokine, where the cleavage product is capable of binding to the target protein, the cleavage product comprising a polypeptide comprising formula:

PCP-SD-C

wherein PCP is a portion of a proteolytically cleavable peptide; SD is a spacer domain; and C is a cytokine moiety.

[0560] Further provided herein is a cleavage product of a masked cytokine, where the cleavage product is capable of binding to the target protein, the cleavage product comprising a protein heterodimer comprising:
[0561] a) a first polypeptide chain comprising a first half-life extension moiety; and
[0562] b) a second polypeptide chain comprising a polypeptide comprising formula:

HL2-L2-C

wherein HL2 is a second half-life extension moiety; L2 is a non-cleavable linker; and C is a cytokine moiety; and wherein the first half-life extension moiety is associated with the second half-life extension moiety. Also provided herein is a distribution of cleavage products obtained or obtainable from a single structure of a masked cytokine, where each cleavage product within the distribution of cleavage products (i) is capable of binding to the target protein and (ii) comprises a protein heterodimer comprising:
[0563] a) a first polypeptide chain comprising a first half-life extension moiety; and
[0564] b) a second polypeptide chain comprising a polypeptide comprising formula:

HL2-L2-C

wherein HL2 is a second half-life extension moiety: L2 is a non-cleavable linker, and C is a cytokine moiety; and wherein the first half-life extension moiety is associated with the second half-life extension moiety.

[0565] Further provided herein is a cleavage product of a masked cytokine, where the cleavage product is capable of binding to the target protein, the cleavage product comprising a protein heterodimer comprising:
[0566] a) a first polypeptide chain comprising a polypeptide comprising formula:

HL1-SD-PCP

wherein HL1 is a first half-life extension moiety; SD is a spacer domain; and PCP is a portion of a proteolytically cleavable peptide; and
[0567] b) a second polypeptide chain comprising a polypeptide comprising formula:

HL2-L2-C

wherein HL2 is a second half-life extension moiety; L2 is a non-cleavable linker; and C a cytokine moiety; and wherein the first half-life extension moiety is associated with the second half-life extension moiety.

[0568] Within the cleavage product, the masking moiety, half-life extension moieties, cytokine moiety, linkers, space domains may be any one of those described herein, and any combination of those described herein.

[0569] The location of the cleavable peptide determines the structure of the resulting cleavage product comprising the cytokine moiety.

[0570] A “portion of a proteolytically cleavable peptide”, refers to a part of the original proteolytically cleavable peptide sequence after cleavage at the cleavage site has occurred. After cleavage, further modification of the initial cleavage product, e.g. by removal of one or two terminal amino acids, may also occur by the further action of proteases in the tumor cell environment. As such, cleavage products within the distribution of cleavage products that might be formed in the tumor cell environment of a patient following administration of a masked cytokine might not contain any portion of the proteolytically cleavable peptide.

[0571] In some embodiments, a “portion” refers to 1 amino acid, 2 amino acids, 3 amino acids, 4 amino acids, 5 amino acids or 6 amino acids of the original proteolytically cleavable peptide sequence. In some embodiments, a “portion” refers to 2 amino acids of the original proteolytically cleavable peptide sequence. In some embodiments, a “portion” refers to 3 amino acids of the original proteolytically cleavable peptide sequence. In some embodiments, a “portion” refers to 4 amino acids of the original proteolytically cleavable peptide sequence.

[0572] In some embodiments, the ‘portion’ of the proteolytically cleavable peptide is from 3 to 6 amino acids in length. In some embodiments, the ‘portion’ of the proteolytically cleavable peptide is 3 or 4 amino acids in length.

[0573] Exemplary cleavage sites for cleavable linkers disclosed herein are disclosed below (* indicates a known or observed protease cleavage site within the cleavable peptide):

DLLA*VVAAS
ISSGLL*SG*RS

[0574] Accordingly, herein disclosed is the cleavage product of any one of the polypeptide drug constructs or masked cytokines disclosed herein.

### 3. Binding Assays

[0575] The strength, or affinity of immunological binding interactions, such as between a cytokine or functional fragment thereof and a binding partner (e.g., a target protein, such as a cytokine receptor) for which the cytokine or functional fragment thereof is specific, can be expressed in terms of the dissociation constant (Kd) of the interaction, wherein a smaller Kd represents a greater affinity. The binding of the cytokine to the cytokine receptor can be expressed in terms of the Kd. In some embodiments, the immunological binding interactions are between a masked cytokine (in the presence or absence of a protease) and a target protein, such as a cytokine receptor. In the context of IL-2 cytokine binding, the target protein could be IL-2R (comprising the IL-2Rα, IL-2Rβ, and IL-2Rγ chains), the IL-2Rα chain, the IL-2Rβ chain, or the IL-2Rα/β dimeric complex. Immunological binding properties of proteins can be quantified using methods well known in the art. For example, one method comprises measuring the rates of cytokine receptor (e.g., IL-2R)/cytokine (e.g., IL-2) complex formation and dissociation, wherein those rates depend on the concentrations of the complex partners, the affinity of the interaction, and geometric parameters that equally influence the rate in both directions. Both the “on rate constant” (Kon) and the “off rate constant” (Koff) can be determined by calculation of the concentrations and the actual rates of association and dissociation. The ratio of Koff/Kon enables the cancelation of all parameters not related to affinity, and is equal to the dissociation constant Kd. See Davies et al., Annual Rev Biochem. 59:439-473, (1990).

[0576] In some aspects, a masked cytokine described herein binds to a target protein with about the same or higher affinity upon cleavage with a protease as compared to the parental cytokine that comprises a masking moiety but does not comprise a cleavable peptide. The target protein can be any cytokine receptor. In some embodiments, the target protein is IL-2R (comprising the IL-2Rα, IL-2Rβ, and IL-2Rγ chains). In some embodiments, the target protein is IL-2Rα. In some embodiments, the target protein is IL-2Rβ. In some embodiments, the target protein is the IL-2Rα/β dimeric complex.

[0577] In some embodiments, a masked cytokine provided herein that does not comprise a cleavable peptide in the linker has a dissociation constant (Kd) of ≤1M, ≤150 nM, ≤100 nM, ≤50 nM, ≤10 nM, ≤1 nM, ≤0.1 nM, ≤0.01 nM, or ≤0.001 nM (e.g. 10-8 M or less, e.g. from 10-8M to 10-13 M, e.g., from 10-9 M to 10-13 M) with the target protein. In some embodiments, a masked cytokine provided herein that comprises a cleavable peptide in the linker has a dissociation constant (Kd) of ≤1M, ≤150 nM, ≤100 nM, ≤50 nM, ≤10 nM, ≤1 nM, ≤0.1 nM, ≤0.01 nM, or 0.001 nM (e.g. 10-8 M or less, e.g. from 10-8 M to 10-13 M, e.g., from 10-9 M to 10-13 M) with the target protein prior to cleavable with a protease. In some embodiments, a masked cytokine provided herein that comprises a cleavable peptide in the linker has a dissociation constant (Kd) of ≤1M, ≤150 nM, ≤100 nM, ≤50 nM, ≤10 nM, ≤1 nM, ≤0.1 nM, ≤0.01 nM, or ≤0.001 nM (e.g. 10-8 M or leas, e.g. from 10-8 M to 10-13 M, e.g., from 10-9M to 10-13 M) with the target protein upon cleavage with a protease. In some embodiments, the cytokine or functional fragment thereof of a masked cytokine provided herein has a dissociation constant (Kd) of ≥500M, ≥250M, ≥200M, ≥150M, ≥100M, ≥50, ≥10M, ≥1M, ≥500 nM, ≥250 nM, ≥150 nM, ≥100 nM, ≥50 nM, ≥1 nM, ≥1 nM, ≥0.1 nM, ≥0.01 nM, or ≥0.001 nM with the masking moiety of the masked cytokine. In some embodiments, the cytokine or functional fragment thereof of a masked cytokine provided herein has a dissociation constant (Kd) that is between about 200M and about 50 nM, such as about or at least about 175M, about or at least about ISM, about or at least about 125M, about or at least about 100M, about or at least about 75M, about or at least about 50M, about or at least about 25M, about or at least about 5M, about or at least about 1M, about or at least about 750 nM, about or at least about 500 nM, about or at least about 250 nM, about or at least about 150 nM, about or at least about 100 nM, about or at least about 75 nM, or about or at least about 50 nM. Assays for assessing binding affinity are well known in the art.

[0578] In some aspects, masked cytokines that exhibit a desired occlusion ratio are provided. The term “occlusion ratio” as used herein refers a ratio of (a) a maximum detected level of a parameter under a first set of conditions to (b) a minimum detected value of that parameter under a second set of conditions. In the context of a masked IL-2 polypeptide, for example, the occlusion ratio refers to the ratio of (a) a maximum detected level of target protein (e.g., IL-2R protein) binding to the masked IL-2 polypeptide in the presence of at least one protease capable of cleaving the cleavable peptide of the masked IL-2 polypeptide to (b) a minimum detected level of target protein (e.g., IL-2R protein) binding to the masked IL-2 polypeptide in the absence of the protease. Thus, the occlusion ratio for a masked cytokine can be calculated by dividing the EC50 of the masked cytokine pre-cleavage by the EC50 of the masked cytokine post-cleavage. The occlusion ratio of a masked cytokine can also be calculated as the ratio of the dissociation constant of the masked cytokine before cleavage with a protease to the dissociation constant of the masked cytokine after cleavage with a protease. In some embodiments, a greater occlusion ratio for the masked cytokine indicates that target protein bound by the masked cytokine occurs to a greater extent (e.g., predominantly occurs) in the presence of a protease capable of cleaving the cleavable peptide of the masked cytokine than in the absence of a protease.

[0579] In some embodiments, masked cytokines with an optimal occlusion ratio are provided herein. In some embodiments, an optimal occlusion ratio of a masked cytokine indicates the masked cytokine has desirable properties useful for the methods or compositions contemplated herein. In some embodiments, a masked cytokine provided herein exhibits an optimal occlusion ratio of about 2 to about 10.000, e.g., about 80 to about 100. In a further embodiment of any of the masked cytokine provided herein, the occlusion ratio is about 2 to about 7,500, about 2 to about 5,000, about 2 to about 2,500, about 2 to about 2.000, about 2 to about 1,000, about 2 to about 900, about 2 to about 800, about 2 to about 700, about 2 to about 600, about 2 to about 500, about 2 to about 400, about 2 to about 300, about 2 to about 200, about 2 to about 100, about 2 to about 50, about 2 to about 25, about 2 to about 15, about 2 to about 10, about 5 to about 10, about 5 to about 15, about 5 to about 20, about 10 to about 100, about 20 to about 100, about 30 to about 100, about 40 to about 100, about 50 to about 100, about 60 to about 100, about 70 to about 100, about 80 to about 100, or about 100 to about 1,000. In some embodiments, a masked cytokine provided herein exhibits an optimal occlusion ratio of about 2 to about 1,000. Binding of a masked cytokine to a target protein before cleavage and/or after cleavage with a protease can be determined using techniques well known in the art such as by ELISA.

[0580] In some embodiments, a masking moiety described herein binds to a cytokine or functional fragment thereof as described herein with lower affinity than the affinity between the cytokine or functional fragment thereof and a target protein (e.g., cytokine receptor). In certain embodiments, a masking moiety provided herein binds to a cytokine or functional fragment thereof as described herein with a dissociation constant (Kd) of ≥500M, ≥250M, ≥200M, ≥150M, ≥100M, ≥50M, ≥10M, ≥1M, ≥500 nM, ≥250 nM, ≥150 nM, ≥100 nM, ≥50 nM, ≥10 nM, ≥1 nM, ≥0.1 nM, ≥0.01 nM, or ≥0.001 nM.

### 4. Masked Cytokine Production

[0581] The masked cytokines described herein are prepared using techniques available in the art, exemplary methods of which are described.

[0582] 4.1 Antibody Production

[0583] Some embodiments of the masked cytokine comprise an antibody or fragment thereof. The following sections provide further detail on the production of antibodies and antibody fragments, variants, and derivatives thereof, that may be used in some embodiments of the masked cytokine provided herein. In some embodiments, the masked cytokine is in the form of a dimer produced by two copies of a masked cytokine that are associated through disulfide bonds.

[0584] 1. Antibody Fragments

[0585] The present invention encompasses. In some embodiments, antibody fragments. The antibody fragments can be any antibody fragments, such as an Fc domain, a portion of the heavy chain, a portion of the light chain, an Fab, an Fv, or an scFv, among other fragments. Antibody fragments may be generated by traditional means, such as enzymatic digestion, or by recombinant techniques. In certain circumstances, there are advantages of linking antibody fragments, rather than whole antibodies, to the masked cytokines described herein. For a review of certain antibody fragments, see Hudson et al. (2003) Nat. Med. 9:129-134.

[0586] Various techniques have been developed for the production of antibody fragments. Traditionally, these fragments were derived via proteolytic digestion of intact antibodies (see, e.g., Morimoto et al., Journal of Biochemical and Biophysical Methods 24:107-117 (1992); and Brennan et al., Science, 229:81 (1985)). However, these fragments can now be produced directly by recombinant host cells. Fab, Fv and ScFv antibody fragments can all be expressed in and secreted from E. coli and other cell types, such as HEK293 and CHO cells, thus allowing the facile production of large amounts of these fragments. Alternatively, Fab-SH fragments can be directly recovered from culture media and chemically coupled to form F(ab)2 fragments (Carter et al.. Bio/Technology 10: 163-167 (19)2)). According to another approach. F(ab)2 fragments can be isolated directly from recombinant host cell culture. Fab and F(ab)2 fragments with increased in vivo half-life comprising FcRN/salvage receptor binding epitope residues are described in U.S. Pat. No. 5,869,046. Other techniques for the production of antibody fragments for use in the masked cytokines will be apparent to the skilled practitioner. In certain embodiments, a masked cytokine comprises a single chain Fv fragment (scFv). See WO 93/16185; U.S. Pat. Nos. 5,571,894, and 5,587,458. scFv fusion proteins may be constructed to yield fusion of an effector protein at either the amino or the carboxy terminus of an scFv. See Antibody Engineering, ed. Borrebaeck, supra. Also, in some embodiments, bi-scFv comprising two scFvs linked via a polypeptide linker can be used with the masked cytokines.

[0587] The present invention includes, in some embodiments, a linear antibody (e.g., as described in U.S. Pat. No. 5,641,870) or a single chain immunoglobulin comprising heavy and light chain sequences of the antibody linked via an appropriate linker. Such linear antibodies or immunoglobulins may be monospecific or bispecific. Such a single chain immunoglobulin can be dimerized to thereby maintain a structure and activities similar to those of the antibody, which is originally a tetramer. Also, in some embodiments, the antibody or fragment thereof may be an antibody that has a single heavy chain variable region and has no light chain sequence. Such an antibody is called a single domain antibody (sdAb) or a nanobody. These antibodies are also encompassed in the meaning of the functional fragment of the antibody according to the present invention. Antibody fragments can be linked to the masked cytokines described herein according to the guidance provided herein.

[0588] 2. Humanized Antibodies

[0589] The invention encompasses, in some embodiments, humanized antibodies or antibody fragments thereof. In some embodiments, the humanized antibodies can be any antibodies, including any antibody fragment. Various methods for humanizing non-human antibodies are known in the art. For example, a humanized antibody can have one or more amino acid residues introduced into it from a source which is non-human. These non-human amino acid residues are often referred to as “import” residues, which are typically taken from an “import” variable domain. Humanization can be essentially performed following the method of Winter (Jones et al. (1986) Nature 321:522-525; Riechmann et al. (1988) Nature 332:323-327; Verhoeyen et al. (1988) Science 239:1534-1536), by substituting hypervariable region sequences for the corresponding sequences of a human antibody. Accordingly, such “humanized” antibodies are chimeric antibodies (U.S. Pat. No. 4,816,567) wherein substantially less than an intact human variable domain has been substituted by the corresponding sequence from a non-human species. In practice, humanized antibodies are typically human antibodies in which some hypervariable region residues and possibly some FR residues are substituted by residues from analogous sites in rodent antibodies. Humanized antibodies can be linked to the masked cytokines described herein according to the guidance provided herein.

[0590] 3. Human Antibodies

[0591] Human antibodies of some embodiments of the invention can be constructed by combining Fv clone variable domain sequence(s) selected from human-derived phage display libraries with known human constant domain sequences(s). Alternatively, human monoclonal antibodies of some embodiments of the invention can be made by the hybridoma method, e.g., by using mouse, rat, bovine (e.g., cow), or rabbit cells, for example, to produce the human monoclonal antibodies. In some embodiments, the human antibodies and human monoclonal antibodies can be antibodies that bind to any antigen. In some embodiments, human monoclonal antibodies of the invention can be made by immunizing a non-human animal that comprises human immunoglobulin loci with the target antigen, and isolating the antibody from the immunized animal or from cells derived from the immunized animal. Examples of suitable non-human animals include a transgenic or transchromosomic animal, such as HuMAb Mouse® (Medarex, Inc.), KM Mouse®, “TC mice,” and Xenomouse™. See, e.g., Lonberg, et al. (1994) Nature 368: 856-859; Fishwild, D. et al. (1996) Nature Biotechnology 14: 845-851; WO2002143478; U.S. Pat. Nos. 5,939,598; 6,075,181; 6,114,598; 6,150,584; 6,162,963; and Tomizuka et al. (200) Proc. Natl. Acad. Sci. USA 97:722-727.

[0592] Human myeloma and murine-human heteromyeloma cell lines for the production of human monoclonal antibodies have been described, for example, by Kozbor J. Immunol., 133: 3001 (1984); Brodeur et al., Monoclonal Antibody Production Techniques and Applications. pp. 51-63 (Marcel Dekker. Inc., New York, 1987); and Boerner et al., J. Immunol., 147: 86 (1991). Human antibodies can be linked to the masked cytokines described herein according to the guidance provided herein.

[0593] 4. Bispecific Antibodies

[0594] Bispecific antibodies are monoclonal antibodies that have binding specificities for at least two different antigens. In certain embodiments, bispecific antibodies are human or humanized antibodies. In some embodiments, one of the binding specificities is for a first antigen and the other binding specificity is for a second antigen, which may be either two different epitopes on the same target protein, or two different epitopes on two different target proteins. Bispecific antibodies may also be used to localize cytotoxic agents to cells which express the first antigen and/or the second antigen. Bispecific antibodies may also be used to recruit cells, such as T cells or natural killer cells, to kill certain cells, e.g., cancer cells. Bispecific antibodies can be prepared as full-length antibodies or antibody fragments (e.g. F(ab′)2 bispecific antibodies). Bispecific antibodies can be linked to the masked cytokines described herein according to the guidance provided herein.

[0595] Methods for making bispecific antibodies are known in the art. See Milstein and Cuello. Nature, 305: 537 (1983), WO 93/08829 published May 13, 1993, Traunecker et al., EMBO J., 10: 3655 (1991); Kontermann and Brinkmann, Drug Discovery Today, 20(7):838-847. For further details of generating bispecific antibodies see, for example, Suresh et al., Methods in Enzymology, 121:210 (1986). Bispecific antibodies include cross-linked or “heteroconjugate” antibodies. For example, one of the antibodies in the heteroconjugate can be coupled to avidin, the other to biotin. Heteroconjugate antibodies may be made using any convenient cross-linking method. Suitable cross-linking agents are well known in the art, and are disclosed in U.S. Pat. No. 4,676,980, along with a number of cross-linking techniques.

[0596] 5. Single-Domain Antibodies

[0597] In some embodiments, a single-domain antibody is linked to the masked cytokine in accordance with the guidance provided herein. The single-domain antibody can be any antibody. A single-domain antibody is a single polypeptide chain comprising all or a portion of the heavy chain variable domain or all or a portion of the light chain variable domain of an antibody. In certain embodiments, a single-domain antibody is a human single-domain antibody (Domantis, Inc., Waltham, Mass.; see, e.g., U.S. Pat. No. 6,248,516 B1). In some embodiments, a single-domain antibody consists of all or a portion of the heavy chain variable domain of an antibody. In some embodiment, the single domain antibody is a camelid-derived antibody obtained by immunization of a camelid with the target antigen. In some embodiments, the single domain antibody is a shark-derived antibody obtained by immunization of a shark with the target antigen. In some embodiments, the single domain antibody is a Nanobody (see, e.g., WO 2004041 X65A2 and US20070269422A1).

[0598] 6. Antibody Variant

[0599] In some embodiments, amino acid sequence modification(s) of the antibodies or fragments thereof described herein are contemplated. For example, it may be desirable to improve the FcRn-binding affinity and/or pH-dependent FcRn-binding affinity of the antibody. It may also be desirable to promote heterodimerization of antibody heavy chains by introducing certain amino acid modifications. Methods for promoting heterodimerization of antibody chains, including certain modifications that can be made to facilitate heterodimerization, is described by Klein et al. (2012), MAbs, 4(6): 653-663.

[0600] Amino acid sequence variants of the antibody may be prepared by introducing appropriate changes into the nucleotide sequence encoding the antibody, or by peptide synthesis. Such modifications include, for example, deletions from, and/or insertions into and/or substitutions of, residues within the amino acid sequences of the antibody. Any combination of deletion, insertion, and substitution can be made to arrive at the final construct, provided that the final construct possesses the desired characteristics. The amino acid alterations may be introduced in the subject antibody amino acid sequence at the time that sequence is made.

[0601] A useful method for identification of certain residues or regions of the antibody that are preferred locations for mutagenesis is called “alanine scanning mutagenesis” as described by Cunningham and Wells (1989) Science, 244:1081-1085. Here, a residue or group of target residues are identified (e.g., charged residues such as arg, asp, his, lys, and glu) and replaced by a neutral or negatively charged amino acid (e.g., alanine or polyalanine) to affect the interaction of the amino acids with antigen. Those amino acid locations demonshating functional sensitivity to the substitutions then are refined by introducing further or other variants at, or for, the sites of substitution. Thus, while the site for introducing an amino acid sequence variation is predetermined, the nature of the mutation per se need not be predetermined. For example, to analyze the performance of a mutation at a given site, ala scanning or random mutagenesis is conducted at the target codon or region and the expressed immunoglobulins are screened for the desired activity.

[0602] Amino acid sequence insertions include amino- and/or carboxyl-terminal fusions ranging in length from one residue to polypeptides containing a hundred or more residues, as well as intrasequence insertions of single or multiple amino acid residues. Examples of terminal insertions include an antibody with an N-terminal methionyl residue. Other insertional variants of the antibody molecule include the fusion to the N- or C-terminus of the antibody to an enzyme or a polypeptide which increases the serum half-life of the antibody.

[0603] In some embodiments, the masked cytokine is modified to eliminate, reduce, or otherwise hinder protease cleavage near the hinge region. The “hinge region” of an IgG is generally defined as including E216 and terminating at P230 of human IgG1 according to the EU index as in Kabat, but, functionally, the flexible portion of the chain may be considered to include additional residues termed the upper and lower hinge regions, such as from E216 to G237 (Roux et al., 1998 J Immunol 161:4083) and the lower hinge has been referred to as residues 233 to 239 of the Fc region where FcγR binding was generally attributed. Modifications to any of the masked cytokines described herein, can be performed, for example, according to the methods described in US 20150139984A1, which is incorporated herein by reference, as well as by incorporating any of the modifications described therein.

[0604] In some embodiments, FcRn mutations that improve pharmacokinetics include, but are not limited to, M428L, T250Q/M428L, M252Y/S254T/T256E, P257I/N434H, D376V/N434H, P257I/Q311I, N434A, N434W, M428L/N434S, V259I/V308F, M252Y/S254T/T256E, V259I/V308F/M428L, T307Q/N434A, T307Q/N434S, T307Q/E380A/N434A, V308P/N434A, N434H, V308P. In some embodiments, such mutations enhance antibody binding to FcRn at low pH but do not change the antibody affinity at neutral pH.

[0605] In certain embodiments, an antibody or fragment thereof is altered to increase or decrease the extent to which the antibody is glycosylated. Glycosylation of polypeptides is typically either N-linked or O-linked. N-linked refers to the attachment of a carbohydrate moiety to the side chain of an asparagine residue. The peptide sequences asparagine-X-serine and asparagine-X-threonine, where X is any amino acid except proline, are the recognition sequences for enzymatic attachment of the carbohydrate moiety to the asparagine side chain. Thus, the presence of either of these tripeptide sequences in a polypeptide creates a potential glycosylation site. O-linked glycosylation refers to the attachment of one of the sugars N-acetylgalactosamine, galactose, or xylose to a hydroxyamino acid, most commonly serine or threonine, although 5-hydroxyproline or 5-hydroxylysine may also be used.

[0606] Addition or deletion of glycosylation sites to the masked cytokine is conveniently accomplished by altering the amino acid sequence such that one or more of the above-described tripeptide sequences (for N-linked glycosylation sites) is created or removed. The alteration may also be made by the addition, deletion, or substitution of one or more serine or threonine residues to the sequence of the original antibody (for O-linked glycosylation sites).

[0607] Where the antibody or fragment thereof comprises an Fc region, the carbohydrate attached thereto may be altered. For example, antibodies with a mature carbohydrate structure that lacks fucose attached to an Fc region of the antibody are described in US Pat Appl No US 2003/0157108 (Presta, L.). See also US 2004/0093621 (Kyowa Hakko Kogyo Co., Ltd). Antibodies with a bisecting N-acetylglucosamine (GlcNAc) in the carbohydrate attached to an Fc region of the antibody are referenced in WO 2003/011878, Jean-Mairet et al, and U.S. Pat. No. 6,602,684, Umana et al. Antibodies with at least one galactose residue in the oligosaccharide attached to an Fc region of the antibody are reported in WO 1997/30087, Patel et al. See, also, WO 1998/58964 (Raju, S.) and WO 1999/22764 (Raju, S.) concerning antibodies with altered carbohydrate attached to the Fc region thereof. See also US 2005/0123546 (Umana et al.) on antigen-binding molecules with modified glycosylation.

[0608] In certain embodiments, a glycosylation variant comprises an Fc region, wherein a carbohydrate structure attached to the Fc region lacks fucose or has reduced fucose. Such variants have improved ADCC function. Optionally, the Fc region further comprises one or more amino acid substations therein which further improve ADCC, for example, substitutions at positions 298, 333, and/or 334 of the Fc region (Eu numbering of residues). Examples of publications related to “defucosylated” or “fucose-deficient” antibodies include: US 2003/0157108; WO 2000/61739: WO 2001/29246; US 2003/0115614; US 200210164328; US 2004/0093621; US 2004/0132140; US 2004/0110704; US 2004/0110282; US 2004/0109865: WO 2003/085119; WO 2003/084570; WO 2005/035586; WO 20054035778: WO2005/053742; Okazaki et al. J. Mol. Biol. 336:1239-1249 (2004); Yamane-Ohnuki et al. Biotech. Bioeng. 87: 614 (2004). Examples of cell lines producing defucosylated antibodies include Lee 13 CHO cells deficient in protein fucosylation (Ripka et al. Arch. Biochem. Biophys. 249:533-545(1986); US Pat App No US 2003/0157108 A1. Presta, L; and WO 2004/056312 A1. Adams et al., especially at Example 11), and knockout cell lines, such as alpha-1,6-fucosyltransferase gene, FUT8, knockout CHO cells (Yamane-Ohnuki et al. Biotech. Bioeng. 87: 614(2004)), and cells overexpressing (31,4-N-acetylglycosaminyltransferases III (GnT-III) and Golgi p-mannosidase II (ManII).

[0609] In any of the embodiments herein, the masked cytokine can be engineered to improve antibody-dependent cell-mediated cytotoxicity (ADCC) activity. In some embodiments, the masked cytokine may be produced in a cell line having a alpha1,6-fucosyltransferase (Fut8) knockout. In some embodiments, the host cells have been modified to have reduced intrinsic alpha1,6-fucosylation activity. Examples of methods for modifying the fucosylation pathways in mammalian host cells can be found in, e.g., Yamane-Ohnuki and Satoh, MAbs, 1(3): 230-236 (2009), the contents of which are incorporated herein by reference. Examples of methods and compositions for partially or completely inactivating the expression of the FUT8 gene can be found in, e.g., US Pub. No. 20160194665A1; WO2006133148A2, the contents of which are incorporated herein by reference. In some embodiments, the masked cytokine is produced in the Lec13 variant of CHO cells (see, e.g., Shields et al., J. Biol. Chem., 277(30):26733-40 (2002)) or the YB2/0 cell line having reduced FUT8 activity (see, e.g., Shinkawa et al., J. Biol. Chem., 278(5): 3466-73 (2003)). In some embodiments, small interfering RNA (siRNA) against genes relevant to alpha1,6-fucosylation can be introduced (see, e.g., Mori et al., Biotechnol. Bioeng. 88(7): 901-908 (2004); Imai-Nishiya et al., BMC Biotechnol. 7: 84 (2007); Omasa et al., J. Biosci. Bioeng., 106(2): 168,173 (2008)). In some further embodiments, the masked cytokine may be produced in a cell line overexpressing 31,4-N-acetylglucosaminyltransferase III (GnT-III). In further embodiments, the cell line additionally overexpresses Golgi p-mannosidase II (ManII). In some of the embodiments herein, the masked cytokine may comprise at least one amino acid substitution in the Fc region that improves ADCC activity.

[0610] In some embodiments, the masked cytokine is altered to improve its serum half-life. To increase the serum half-life of the cytokine, one may incorporate a FcRN/salvage receptor binding epitope into a linked antibody (especially an antibody fragment) as described in U.S. Pat. No. 5,739,277, for example. As used herein, the term “salvage receptor binding epitope” refers to an epitope of the Fc region of an IgG molecule (e.g., IgG1, IgG2, IgG3, or IgG4) that is responsible for increasing the in vivo serum half-life of the IgG molecule (US 2003/0190311, U.S. Pat. Nos. 6,921,505; 6,165,745; 5,624,821; 5,648,260; 6,165,745; 5,834,597).

[0611] Another type of variant is an amino acid substitution variant. These variants have at least one amino acid residue in the antibody molecule replaced by a different residue. Sites of interest for substitutional mutagenesis include the hypervariable regions, but FR alterations are also contemplated. Conservative substitutions are shown in Table 2 under the heading of “preferred substitutions.” If such substitutions result in a desirable change in biological activity, then more substantial changes, denominated “exemplary substitutions” in Table 2, or as further described below in reference to amino acid classes, may be introduced and the products screened.

TABLE 2

| Original | | Preferred |
|---|---|---|
| Residue | Exemplary Substitutions | Substitutions |
| Ala (A) | Val; Leu; Ile | Val |
| Arg (R) | Lys; Gln; Asn | Lys |
| Asn (N) | Gln; His; Asp; Lys; Arg | Gln |
| Asp (D) | Glu; Asn | Glu |
| Cys (C) | Ser; Ala | Ser |
| Gln (Q) | Asn; Glu | Asn |
| Glu (E) | Asp; Gln | Asp |
| Gly (G) | Ala | Ala |
| His (H) | Asn; Gln; Lys; Arg | Arg |
| Ile (I) | Leu; Val; Met; Ala; Phe; Norleucine | Leu |
| Leu (L) | Norleucine; Ile; Val; Met; Ala; Phe | Ile |
| Lys (K) | Arg; Gln; Asn | Arg |
| Met (M) | Leu; Phe; Ile | Leu |
| Phe (F) | Trp; Leu; Val; Ile; Ala; Tyr | Tyr |
| Pro (P) | Ala | Ala |
| Ser (S) | Thr | Thr |
| Thr (T) | Val; Ser | Ser |
| Trt (W) | Tyr; The | Tyr |
| Tyr (Y) | Trp; Phe; Thr; Ser | Phe |
| Val (V) | Ile; Leu; Met; Phe; Ala; Norleucine | Leu |

[0612] Substantial modifications in the biological properties of the antibody are accomplished by selecting substitutions that differ significantly in their effect on maintaining (a) the structure of the polypeptide backbone in the area of the substitution, for example, as a sheet or helical conformation, (b) the charge or hydrophobicity of the molecule at the target site, or c) the bulk of the side chain. Amino acids may be grouped according to similarities in the properties of their side chains (in A. L. Lehninger, in Biochemistry, second ed., pp. 73-75. Worth Publishers, New York (1975)):

(1) non-polar, Ala (A), Val (V), Leu (L), lie (I), Pro (P), Phe (F), Trp (W), Met (M)
(2) uncharged polar: Gly (G), Ser (S), Thr (T), Cys (C), Tyr (Y), Asn (N), Gin (Q)
(3) acidic: Asp (D), Glu (E)
(4) basic: Lys (K), Arg (R), His (H)

[0613] Alternatively, naturally occurring residues may be divided into groups based on common side-chain properties:

(1) hydrophobic: Norleucine, Met, Ala, Val, Leu, he;
(2) neutral hydrophilic: Cys, Ser, Thr, Asn, Gin;
(3) acidic: Asp, Glu;
(4) basic: His, Lys, Arg;
(5) residues that influence chain orientahon: Gly, Pro;
(6) aromatic: Trp, Tyr, Phe,

[0614] Non-conservative substitutions will entail exchanging a member of one of these classes for another class. Such substituted residues also may be introduced into the conservative substitution sites or, into the remaining (non-conserved) sites.

[0615] Another type of substitutional variant involves the substitution of a naturally occurring amino acid residue for a non-naturally occurring amino acid residue. Non-naturally occurring amino acid residues can be incorporated, e.g., through tRNA recoding, or through any of the methods as described, e.g., in WO 2016154675A1, which is incorporated herein by reference.

[0616] One type of substitutional variant involves substituting one or more hypervariable region residues of a parent antibody (e.g., a humanized or human antibody). Generally, the resulting variant(s) selected for further development will have modified (e.g., improved) biological properties relative to the parent antibody from which they are generated. A convenient way for generating such substitutional variants involves affinity maturation using phage display, yeast display, or mammalian display. Briefly, several hypervariable region sites (e.g., 6-7 sites) are mutated to generate all possible amino acid substitutions at each site. The antibodies thus generated are displayed from filamentous phage particles as fusions to at least part of a phage coat protein (e.g., the gene II product of M13) packaged within each particle. The phage-displayed variants are then screened for their biological activity (e.g., binding affinity). In order to identify candidate hypervariable region sites for modification, scanning mutagenesis (e.g., alanine scanning) can be performed to identify hypervariable region residues contributing significantly to antigen binding. Alternatively, or additionally, it may be beneficial to analyze a crystal structure of the antigen-antibody complex to identify contact points between the antibody and antigen. Such contact residues and neighbouring residues are candidates for substitution according to techniques known in the art, including those elaborated herein. Once such variants are generated, the panel of variants is subjected to screening using techniques known in the an, including those described herein, and antibodies with superior properties in one or more relevant assays may be selected for further development.

[0617] Nucleic acid molecules encoding amino acid sequence variants of the masked cytokines are prepared by a variety of methods known in the art. These methods include, but are not limited to, isolation from a natural source (in the case of naturally occurring amino acid sequence variants) or preparation by oligonucleotide-mediated (or site-directed) mutagenesis. PCR mutagenesis, and cassette mutagenesis of an earlier prepared variant or a non-variant version of the antibody, for example.

[0618] It may be desirable to introduce one or more amino acid modifications in an Fc region of antibodies of the invention, thereby generating an Fc region variant. The Fc region variant may comprise a human Fc region sequence (e.g., a human IgG1, IgG2, IgG3 or IgG4 Fe region) comprising an amino acid modification (e.g. a substitution) at one or more amino acid positions including that of a hinge cysteine.

[0619] In some embodiments, a masked cytokine provided herein includes an antibody or fragment thereof having an IgG1, IgG2, IgG3, or IgG4 isotype with enhanced effector function. In some embodiments, a masked cytokine provided herein includes an antibody or fragment thereof having an IgG1 isotype with enhanced effector function. In some embodiments, a masked cytokine provided herein has an IgG1 isotype with enhanced effector function. In some embodiments, the masked cytokine is afucosylated. In some embodiments, the masked cytokine has increased levels of mannose moieties. In some embodiments, the masked cytokine has increased levels of bisecting glycan moieties. In some embodiments, the IgG1 comprises amino acid mutations.

[0620] In some embodiments, a masked cytokine provided herein includes an antibody having an IgG1 isotype (e.g., a human IgG1 isotype). In some embodiments, the IgG1 comprises one or more amino acid substitutions that enhance effector function. In one embodiment, the IgG1 comprises the amino acid substitutions S298A, E333A, and K334A wherein the amino acid residues are numbered according to the EU index as in Kabat. In one embodiment, the IgG1 comprises the amino acid substitutions S239D and I332E wherein the amino acid residues are numbered according to the EU index as in Kabat. In one embodiment, the IgG1 comprises the amino acid substitutions S239D, A330L, and I332E wherein the amino acid residues are numbered according to the EU index as in Kabat. In one embodiment, the IgG1 comprises the amino acid substitutions P247I and A339D or A339Q wherein the amino acid residues are numbered according to the EU index as in Kabat. In one embodiment, the IgG1 comprises the amino acid substitutions D280H, K290S with or without S298D or S298V wherein the amino acid residues are numbered according to the EU index as in Kabat. In one embodiment, the IgG1 comprises the amino acid substitutions F243L, R292P, and Y300L, wherein the amino acid residues are numbered according to the EU index as in Kabat. In one embodiment, the IgG1 comprises the amino acid substitutions F243L, R292P, Y300L, and P396L wherein the amino acid residues are numbered according to the EU index as in Kabat. In one embodiment, the IgG1 comprises the amino acid substitutions F243L, R292P. Y300L, V305I, and P396L wherein the amino acid residues are numbered according to the EU index as in Kabat. In one embodiment, the IgG1 comprises the amino acid substitutions G236A, S239D, and I332E wherein the amino acid residues are numbered according to the EU index as in Kabat. In one embodiment, the IgG1 comprises the amino acid substitutions K326A and E333A wherein the amino acid residues are numbered according to the EU index as in Kabat. In one embodiment, the IgG1 comprises the amino acid substitutions K326W and E333S wherein the amino acid residues are numbered according to the EU index as in Kabat. In one embodiment, the IgG1 comprises the amino acid substitutions K290E, S2980, T299A, with or without K326E wherein the amino acid residues are numbered according to the EU index as in Kabat. In one embodiment, the IgG1 comprises the amino acid substitutions K290N, S298G, T299A, with or without K326E wherein the amino acid residues are numbered according to the EU index as in Kabat. In one embodiment, the IgG1 comprises the amino acid substitution K334V wherein the amino acid residues are numbered according to the EU index as in Kabat. In one embodiment, the IgG1 comprises the amino acid substitutions L235S, S239D, and K334V wherein the amino acid residues are numbered according to the EU index as in Kabat. In one embodiment, the IgG1 comprises the amino acid substitutions K334V and Q331M, S239D, F243V, E294L, or S298T wherein the amino acid residues are numbered according to the EU index as in Kabat. In one embodiment, the IgG1 comprises the amino acid substitutions E233L, Q311M. and K334V wherein the amino acid residues are numbered according to the EU index as in Kabat. In one embodiment, the IgG1 comprises the amino acid substitutions L234I, Q311M, and K334V wherein the amino acid residues are numbered according to the EU index as in Kabat. In one embodiment, the IgG1 comprises the amino acid substitutions K334V and S298T, A330M, or A330F wherein the amino acid residues are numbered according to the EU index as in Kabat. In one embodiment, the IgG1 comprises the amino acid substitutions K334V, Q31 1M, and either A330M or A330F wherein the amino acid residues are numbered according to the EU index as in Kabat. In one embodiment, the IgG1 comprises the amino acid substitutions K334V, S298T, and either A330M or A330F wherein the amino acid residues are numbered according to the EU index as in Kabat. In one embodiment, the IgG1 comprises the amino acid substitutions K334V, S239D, and either A330M or S298T wherein the amino acid residues are numbered according to the EU index as in Kabat. In one embodiment, the IgG1 comprises the amino acid substitutions L234Y. Y296W, and K290Y, F243V, or E294L wherein the amino acid residues are numbered according to the EU index as in Kabat. In one embodiment, the IgG1 comprises the amino acid substitutions Y296W and either L234Y or K290Y wherein the amino acid residues are numbered according to the EU index as in Kabat. In one embodiment, the IgG1 comprises the amino acid substitutions S239D, A330S, and I332E wherein the amino acid residues are numbered according to the EU index as in Kabat.

[0621] In some embodiments, the IgG1 comprises one or more amino acid substitutions that decrease or inhibit effector function. In one embodiment, the IgG1 comprises the amino acid substitution N297A, N297G, or N297Q wherein the amino acid residues are numbered according to the EU index as in Kabat. In one embodiment, the IgG1 comprises the amino acid substitution L234A or L235A wherein the amino acid residues are numbered according to the EU index as in Kabat. In one embodiment, the IgG1 comprises the amino acid substitutions C220S, C226S. C229S, and P238S wherein the amino acid residues are numbered according to the EU index as in Kabat. In one embodiment, the IgG1 comprises the amino acid substitutions C226S, C229S, E233P, L234V, and L235A wherein the amino acid residues are numbered according to the EU index as in Kabat. In one embodiment, the IgG1 comprises the amino acid substitutions L234F, L235E, and P331S wherein the amino acid residues are numbered according to the EU index as in Kabat. In one embodiment, the IgG1 comprises the amino acid substitutions S267E and L328F wherein the amino acid residues are numbered according to the EU index as in Kabat.

[0622] In accordance with this description and the teachings of the art, it is contemplated that in some embodiments, an antibody or fragment thereof of the masked cytokine may comprise one or more alterations as compared to the wild type counterpart antibody, e.g. in the Fc region. For example, it is thought that certain alterations can be made in the Fc region that would result in altered (i.e., either improved or diminished) C1q binding and/or Complement Dependent Cytotoxicity (CDC), e.g., as described in WO99/51642. See also Duncan & Winter Nature 322:738-40 (1988); U.S. Pat. Nos. 5,648,260; 5,624,821; and WO94/29351 concerning other examples of Fc region variants. WO00/42072 (Presta) and WO 2004/056312 (Lowman) describe antibody variants with improved or diminished binding to FcRs. The content of these patent publications are specifically incorporated herein by reference. See also Shields et al. J. Biol. Chem. 9(2): 6591-6604 (2001). Antibodies with increased half-lives and improved binding to the neonatal Fc receptor (FcRn), which is responsible for the transfer of maternal IgGs to the fetus (Guyer et al., J. Immunol. 117:587 (1976) and Kim et al., J. Immunol. 24:249 (1994)), are described in US2005/0014934A1 (Hinton et al.). These antibodies comprise an Fc region with one or more substitutions therein which improve binding of the Fc region to FcRn. Polypeptide variants with altered Fc region amino acid sequences and increased or decreased C1q binding capability are described in U.S. Pat. No. 6,194,551B1, WO99/51642. The contents of those patent publications are specifically incorporated herein by reference. See, also, Idusogie et al. J. Immunol. 164: 41784184 (2000).

[0623] 4.2 Masked Cytokine-Drug Conjugates

[0624] The invention also provides masked cytokine-drug conjugates (MCDCs) comprising a masked cytokine provided herein, which can be any masked cytokine disclosed herein, conjugated to one or more agents. In some embodiments, the one or more agents is a cytotoxic agent, such as a chemotherapeutic agent or drug, growth inhibitory agent, toxin (e.g., protein toxin, enzymatically active

toxin of bacterial, fungal, plant, or animal origin, or fragments thereof), or radioactive isotopes. In some embodiments, the one or more agents is an immune stimulant.

[0625] In some embodiments, the one or more drugs conjugated to the masked cytokine includes, but is not limited to, a maytansinoid (see U.S. Pat. Nos. 5,208,020, 5,416,064 and European Patent EP 0 423 235 B1); an auristatin such as monomethylauristatin drug moieties DE and DF (MMAE and MMAF) (see U.S. Pat. Nos. 5,635,483 and 5,780,588, and 7,498,298); a dolastatin; a calicheamicin or derivative thereof (see U.S. Pat. Nos. 5,712,374, 5,714,56, 5,739,116, 5,767,285, 5,770,701, 5,770,710, 5,773,001, and 5,877,296; Hinman et ak. Cancer Res. 53:3336-3342 (1993); and Lode et ak, Cancer Res. 58:2925-2928 (1998)); an anthracycline such as daunomycin or doxorubicin (see Kratz et ak, Current Med. Chem. 13:477-523(2006); Jeffrey et ak, Bioorganic & Med. Chem. Letters 16:358-362 (2006); Torgov et ak, Bioconj. Chem. 16:717-721 (2005); Nagy et ak, Proc. Natl. Acad. Sci. USA 97:829-834 (2000); Dubowchik et ak. Bioorg. & Med. Chem. Letters 12:1529-1532(2002); King et ak, J. Med. Chem. 45:4336-4343 (2002); and U.S. Pat. No. 6,630,579); methotrexate; vindesine; a taxane such as docetaxel, paclitaxel, larotaxel, tesetaxel, and ortataxel; a trichothecene; and CC1065.

[0626] In another embodiment, the one or more drugs conjugated to the masked cytokine includes, but is not limited to, an inhibitor of tubulin polymerization (e.g., maytansinoids and auristatins), DNA damaging agents (e.g., pyrrolobenzodiazepine (PBD) dimers, calicheamicins, duocarmycins and indo-linobenzodiazepine dimers), and DNA synthesis inhibitors (e.g., exatecan derivative Dxd).

[0627] In another embodiment, a masked cytokine-drug conjugate comprises a masked cytokine as described herein conjugated to an enzymatically active toxin or fragment thereof, including, but not limited to, diphtheria A chain, nonbinding active fragments of diphtheria toxin, exotoxin A chain (from Pseudomonas aeruginosa), ricin A chain, abrin A chain, modeccin A chain, alpha-sarcin, Aleurites fordii proteins, dianthin proteins. Phytolaca americana proteins (PAPI, PAPII, and PAP-S), Momordica charantia inhibitor, curcin, crotin, Sapaonaria officinalis inhibitor, gelonin, mitogellin, restrictocin, phenomycin, enomycin, and the tricothecenes.

[0628] In another embodiment, a masked cytokine-drug conjugate comprises a masked cytokine as described herein conjugated to a radioactive atom to form a radioconjugate. A variety of radioactive isotopes are available for the production of radioconjugates. Examples include At211,1131,1125, Y90, Re186, Re188, Sm153, B1212, P32, Pb212 and radioactive isotopes of Lu. When the radioconjugated is used for detection, it may comprise a radioactive atom for scintigraphic studies, for example tc99m or 1123, or a spin label for nuclear magnetic resonance (NMR) imaging (also known as magnetic resonance imaging, mri), such as iodine-123 again, iodine-131, indium-111, fluorine-19, carbon-13, nitrogen-15, oxygen-17, gadolinium, manganese or iron.

[0629] In some embodiments, a masked cytokine-drug conjugate comprises a masked cytokine as described herein conjugated to one or more immune stimulants. In some embodiments, the immune stimulant is a stimulator of interferon genes (STING) agonist or a toll-like receptor (TER) agonist.

[0630] The STING agonist can be any agonist of STING. In some embodiments, the STING agonist is a cyclic dinucleotide (CDN). The CDN can be any CDN or derivative or variant thereof. In some embodiments, the STING agonist is a CDN selected from the group consisting of cGAMP, c-di-AMP, c-di-GMP, cAIMP, and c-di-IMP. In some embodiments, the STING agonist is a derivative or variant of a CDN selected from the group consisting of cGAMP, c-di-AMP, c-di-GMP, cAIMP, and c-di-IMP. In some embodiments, the STING agonist is 4-(2-chloro-6-fluorobenzyl)-N-(furan-2-ylmethyl)-3-oxo-3,4-dihydro-2H-benzo[b][1,4]thiazine-6-carboxamide, or a derivative or variant thereof. See, e.g., Sali et al. (2015) PloS Pathog., 11(12): e005324.

[0631] The TLR agonist can be an agonist of any TLR, such as TLR1, TLR2, TLR3, TLR4, TLR5, TLR6, TLR7, TLR8, TLR9, or TLR10. In some embodiments, the TLR agonist is an agonist of a TLR expressed on the cell surface, such as TLR1, TLR2, TLR4, or TLR5. In some embodiments, the TLR agonist is an agonist of a TLR expressed intracellularly, such as TLR3, TLR7, TLR8, TLR9, or TLR10.

[0632] Conjugates of a masked cytokine and a cytotoxic agent may be made using a variety of bifunctional protein coupling agents such as N-succinimidyl-3-(2-pyridyldithio) propionate (SPDP), succinimidyl-4-(N-maleimidomethyl) cyclohexane-1-carboxylate (SMCC), iminothiolane (IT), bifunctional derivatives of imidoesters (such as dimethyl adipimidate HCl), active esters (such as disuccinimidyl suberate), aldehydes (such as glutaraldehyde), bis-azido compounds (such as bis (p-azidobenzoyl) hexanediamine), bis-diazonium derivatives (such as bis-(p-diazoniumbenzoyl)-ethylenediamine), diisocyanates (such as toluene 2,6-diisocyanate), and bis-active fluorine compounds (such as 1,5-difluoro-2,4-dinitrobenzene). For example, a ricin immunotoxin can be prepared as described in Vitetta et ah, Science 238:1098 (1987). Carbon-14-labeled 1-isothiocyanatobenzyl-3-methyldiethylene triaminepentaacetic acid (MX-DTPA) is an exemplary chelating agent for conjugation of radionucleotide to an antibody. &e WO94/11026. The linker may be a “cleavable linker” facilitating release of a cytotoxic drug in the cell. For example, an acid-labile linker, peptidase-sensitive linker, photolabile linker, dimethyl linker or disulfide-containing linker (Chari et ah, Cancer Res. 52:127-131 (1992), U.S. Pat. No. 5,208,020) may be used.

[0633] The MCDCs herein expressly contemplate, but are not limited to such conjugates prepared with cross-linker reagents including, but not limited to, BMPS, EMCS, GMBS, HBVS, LC-SMCC, MBS, MPBH, SBAP, SIA, SIAB, SMCC, SMPB, SMPH, sulfo-EMCS, sulfo-GMBS, sulfo-KMUS, sulfo-MBS, sulfo-SIAB, sulfo-SMCC, and sulfo-SMPB, and SVSB (succinimidyl-(4-vinylsulfonejbenzoate) which are commercially available (e.g., from Pierce Biotechnology, Inc., Rockford, Ill., U.S.A).

[0634] 4.3 Vectors, Host Cells, and Recombinant Methods

[0635] For recombinant production of a masked cytokine of the invention, the one or more nucleic acids encoding it is isolated and inserted into a replicable vector for further cloning (amplification of the DNA) or for expression. DNA encoding the masked cytokine, including components thereof, is readily isolated and sequenced using conventional procedures. Many vectors are available. The choice of vector depends in part on the host cell to be used. Generally, host cells are of either prokaryotic or eukaryotic (generally mammalian) origin. It will be appreciated that constant regions of any isotype of antibody or fragment thereof, when applicable, can be used for this purpose, including IgG, IgM, IgA, IgD, and IgE constant regions, and that such constant regions can be obtained from any human or animal species. In some embodiments, one vector is used to encode the masked cytokine. In some embodiments, more than one vector is used to encode the masked cytokine.

[0636] 1. Generating Masked Cytokines Using Prokaryotic Host Cells

[0637] a. Vector Construction

[0638] Polynucleotide sequences encoding polypeptide components of the masked cytokines of the invention can be obtained using standard recombinant techniques. Desired polynucleotide sequences of an antibody or antibody fragment thereof may be isolated and sequenced from antibody producing cells such as hybridoma cells. Alternatively, polynucleotides can be synthesized using nucleotide synthesizer or PGR techniques, or obtained from other sources. Once obtained, sequences encoding the components of the masked cytokine are inserted into a recombinant vector capable of replicating and expressing heterologous polynucleotides in prokaryotic hosts. Many vectors that are available and known in the art can be used for the purpose of the present invention. Selection of an appropriate vector will depend mainly on the size of the nucleic acids to be inserted into the vector and the particular host cell to be transformed with the vector. Each vector contains various components, depending on its function (amplification or expression of heterologous polynucleotide, or both) and its compatibility with the particular host cell in which it resides. The vector components generally include, but are not limited to: an origin of replication, a selection marker gene, a promoter, a ribosome binding site (RBS), a signal sequence, the heterologous nucleic acid insert and a transcription terminator sequence.

[0639] In general, plasmid vectors containing replicon and control sequences which are derived from species compatible with the host cell are used in connection with these hosts. The vector ordinarily carries a replication site, as well as marking sequences which are capable of providing phenotypic selection in transformed cells. For example, E. coli is typically transformed using pBR322, a plasmid derived from an E. coli species. pBR322 contains genes-encoding ampicillin (Amp) and tetracycline (Tet) resistance and thus provides easy means for identifying transformed cells. pBR322, its derivatives, or other microbial plasmids or bacteriophage may also contain, or be modified to contain, promoters which can be used by the microbial organism for expression of endogenous proteins. Examples of pBR322 derivatives used for expression of particular antibodies are described in detail in Carter et ah, U.S. Pat. No. 5,648,237.

[0640] In addition, phage vectors containing replicon and control sequences that are compatible with the host microorganism can be used as transforming vectors in connection with these hosts. For example, bacteriophage such as 7GEM™-11 may be utilized in making a recombinant vector which can be used to transform susceptible host cells such as E. coli LE392.

[0641] The expression vector of the invention may comprise two or more promoter-cistron pairs, encoding each of the polypeptide components. A promoter is an untranslated regulatory sequence located upstream (5′) to a cistron that modulates its expression. Prokaryotic promoters typically fall into two classes, inducible and constitutive. Inducible promoter is a promoter that initiates increased levels of transcription of the cistron under its control in response to changes in the culture condition, e.g. the presence or absence of a nutrient or a change in temperature.

[0642] A large number of promoters recognized by a variety of potential host cells are well known. The selected promoter can be operably linked to cistron DNA encoding either chain of the masked cytokine by removing the promoter from the source DNA via restriction enzyme digestion and inserting the isolated promoter sequence into the vector of the invention. Both the native promoter sequence and many heterologous promoters may be used to direct amplification and/or expression of the target genes.

[0643] In some embodiments, heterologous promoters are utilized, as they generally permit greater transcription and higher yields of expressed target gene as compared to the native target polypeptide promoter.

[0644] Promoters suitable for use with prokaryotic hosts include the PhoA promoter, the [3-galactamase and lactose promoter systems, a tryptophan (trp) promoter system and hybrid promoters such as the tac or the trc promoter. However, other promoters that are functional in bacteria (such as other known bacterial or phage promoters) are suitable as well. Their nucleotide sequences have been published, thereby enabling a skilled worker operably to ligate them to cistrons encoding, for example, the target light and heavy chains for masked cytokines comprising a light and heavy chain (Siebenlist et al. (1980) Cell 20: 269) using linkers or adaptors to supply any required restriction sites.

[0645] In one aspect of the invention, each cistron within the recombinant vector comprises a secretion signal sequence component that directs translocation of the expressed polypeptides across a membrane. In general, the signal sequence may be a component of the vector, or it may be a part of the target polypeptide DNA that is inserted into the vector. The signal sequence selected for the purpose of this invention should be one that is recognized and processed (i.e. cleaved by a signal peptidase) by the host cell. For prokaryotic host cells that do not recognize and process the signal sequences native to the heterologous polypeptides, the signal sequence is substituted by a prokaryotic signal sequence selected, for example, from the group consisting of the alkaline phosphatase, penicillinase, Ipp, or heat-stable enterotoxin II (STII) leaders, LamB, PhoE, PelB, OmpA and MBP. In one embodiment of the invention, the signal sequences used in both cistrons of the expression system are STII signal sequences or variants thereof.

[0646] In another aspect, the production of the polypeptide components according to the invention can occur in the cytoplasm of the host cell, and therefore does not require the presence of secretion signal sequences within each cistron. In that regard, for embodiments comprising immunoglobulin light and heavy chains, for example, the light and heavy chains are expressed with or without the sequences for the masking moiety, linker sequence, etc., folded and assembled to form functional immunoglobulins within the cytoplasm. Certain host strains (e.g., the E. coli trxB-strains) provide cytoplasm conditions that are favorable for disulfide bond formation, thereby permitting proper folding and assembly of expressed protein subunits. Proba and Pluckthun Gene, 159:203 (1995).

[0647] Masked cytokines of the invention can also be produced by using an expression system in which the quantitative ratio of expressed polypeptide components can be modulated in order to maximize the yield of secreted and properly assembled antibodies of the invention. Such modulation is accomplished at least in part by simultaneously modulating translational strengths for the polypeptide components.

[0648] Prokaryotic host cells suitable for expressing masked cytokines of the invention include Archaebacteria and Eubacteria, such as Gram-negative or Gram-positive organisms. Examples of useful bacteria include Escherichia (e.g., E. coli), Bacilli (e.g., B. subtilis). Enterobacteria, Pseudomonas species (e.g., P. aeruginosa), Salmonella typhimurium, Serratia marcescans, Klebsiella, Proteus, Shigella, Rhizobia, Vitreoscilla, or Paracoccus. In one embodiment, gram-negative cells are used. In one embodiment, E. coli cells are used as hosts for the invention. Examples of E. coli strains include strain W3110 (Bachmann. Cellular and Molecular Biology, vol. 2 (Washington, D.C.; American Society for Microbiology, 1987). pp. 1190-1219; ATCC Deposit No. 27.325) and derivatives thereof, including strain 33D3 having genotype W3110 AfhuA (AtonA) ptr3 lac 1q lacL8 AompTA (nmpc-fepE) degP41 kanR (U.S. Pat. No. 5,639,635). Other strains and derivatives thereof, such as E. coli 294 (ATCC 31,446). E. coli B, E, colik 1776 (ATCC 31,537) and E. coli RV308 (ATCC 31.608) are also suitable. These examples are illustrative rather than limiting. Methods for constructing derivatives of any of the above-mentioned bacteria having defined genotypes are known in the art and described in, for example, Bass et ah, Proteins, 8:309-314 (1990). It is generally necessary to select the appropriate bacteria taking into consideration replicability of the replicon in the cells of a bacterium. For example, E. coli, Serratia, or Salmonella species can be suitably used as the host when well-known plasmids such as pBR322, pBR325, pACYC177, or pKN410 are used to supply the replicon. Typically, the host cell should secrete minimal amounts of proteolytic enzymes, and additional protease inhibitors may desirably be incorporated in the cell culture.

[0649] b. Masked Cytokine Production

[0650] Host cells are transformed with the above-described expression vectors and cultured in conventional nutrient media modified as appropriate for inducing promoters, selecting transformants, or amplifying the genes encoding the desired sequences.

[0651] Transformation means introducing DNA into the prokaryotic host so that the DNA is replicable, either as an extrachromosomal element or by chromosomal integrant. Depending on the host cell used, transformation is done using standard techniques appropriate to such cells. The calcium treatment employing calcium chloride is generally used for bacterial cells that contain substantial cell-wall barriers. Another method for transformation employs polyethylene glycol/DMSO. Yet another technique used is electroporation.

[0652] Prokaryotic cells used to produce the masked cytokines of the invention are grown in media known in the art and suitable for culture of the selected host cells. Examples of suitable media include luria broth (LB) plus necessary nutrient supplements. In some embodiments, the media also contains a selection agent, chosen based on the construction of the expression vector, to selectively permit growth of prokaryotic cells containing the expression vector. For example, ampicillin is added to media for growth of cells expressing ampicillin resistant gene.

[0653] Any necessary supplements besides carbon, nitrogen, and inorganic phosphate sources may also be included at appropriate concentrations introduced alone or as a mixture with another supplement or medium such as a complex nitrogen source. Optionally, the culture medium may contain one or more reducing agents selected from the group consisting of glutathione, cysteine, cystamine, thioglycollate, dithioerythritol and dithiothreitol.

[0654] The prokaryotic host cells are cultured at suitable temperatures. In certain embodiments, for E. coli growth, growth temperatures range from about 20° C. to about 39° C., from about 25° C. to about 37° C.; or about 30° C. The pH of the medium may be any pH ranging from about 5 to about 9, depending mainly on the host organism. In certain embodiments, for E. coli, the pH is from about 6.8 to about 7.4, or about 7.0.

[0655] If an inducible promoter is used in the expression vector of the invention, protein expression is induced under conditions suitable for the activation of the promoter. In one aspect of the invention, PhoA promoters are used for controlling transcription of the polypeptides. Accordingly, the transformed host cells are cultured in a phosphate-limiting medium for induction. In certain embodiments, the phosphate-limiting medium is the C.R.A.P. medium (see, e.g., Simmons et ah, J. Immunol. Methods (2002), 263:133-147). A variety of other inducers may be used, according to the vector construct employed, as is known in the art.

[0656] In one embodiment, the expressed masked cytokines of the present invention are secreted into and recovered from the periplasm of the host cells. Protein recovery typically involves disrupting the microorganism, generally by such means as osmotic shock, sonication or lysis. Once cells are disrupted, cell debris or whole cells may be removed by centrifugation or filtration. The proteins may be further purified, for example, by affinity resin chromatography. Alternatively, proteins can be transported into the culture media and isolated therein. Cells may be removed horn the culture and the culture supernatant being filtered and concentrated for further purification of the proteins produced. The expressed polypeptides can be further isolated and identified using commonly known methods such as polyacrylamide gel electrophoresis (PAGE) and Western blot assay.

[0657] In one aspect of the invention, masked cytokine production is conducted in large quantity by a fermentation process. Various large-scale fed-batch fermentation procedures are available for production of recombinant proteins. Large-scale fermentations have at least 1000 liters of capacity, and in certain embodiments, about 1,000 to 100,000 liters of capacity. These fermenters use agitator impellers to distribute oxygen and nutrients, especially glucose. Small scale fermentation refers generally to fermentation in a fermentor that is no more than approximately 100 liters in volumetric capacity, and can range horn about 1 liter to about 100 liters.

[0658] In a fermentation process, induction of protein expression is typically initiated after the cells have been grown under suitable conditions to a desired density, e.g., an OD550 of about 180-220, at which stage the cells are in the early stationary phase. A variety of inducers may be used, according to the vector construct employed, as is known in the art and described above. Cells may be grown for shorter periods prior to induction. Cells are usually induced for about 12-50 hours, although longer or shorter induction time may be used.

[0659] To improve the production yield and quality of the polypeptides of the invention, various fermentation conditions can be modified. For example, to improve the proper assembly and folding of, for example, secreted antibody polypeptides, additional vectors overexpressing chaperone proteins, such as Dsb proteins (DsbA, DsbB, DsbC, DsbD and or DsbG) or FkpA (a peptidylprolyl cis,trans-isomerase with chaperone activity) can be used to co-transform the host prokaryotic cells. The chaperone proteins have been demonstrated to facilitate the proper folding and solubility of heterologous proteins produced in bacterial host cells. Chen et al. (1999) J. Biol. Chem. 274:19601-19605; Georgiou et ak, U.S. Pat. No. 6,083,715; Georgiou et ak, U.S. Pat. No. 6,027,888; Bothmann and Pluckthun (2000) J. Biol. Chem. 275:17100-17105; Ramm and Pluckthun (2000) J. Biol. Chem. 275:17106-17113; Arie et ak (2001) Mol. Microbiol. 39:199-210.

[0660] To minimize proteolysis of expressed heterologous proteins (especially those that are proteolytically sensitive), certain host strains deficient for proteolytic enzymes can be used for the present invention. For example, host cell strains may be modified to effect genetic mutation(s) in the genes encoding known bacterial proteases such as Protease III, OmpT, DegP, Tsp, Protease I, Protease Mi. Protease V, Protease VI and combinations thereof. Some E. coli protease-deficient strains are available and described in, for example. Joly et ak (1998), supra; Georgiou et ak, U.S. Pat. No. 5,264,365; Georgiou et ak, U.S. Pat. No. 5,508,192; Kars et ak, Microbial Drug Resistance. 2:63-72 (1996).

[0661] In some embodiments, E. coli strains deficient for proteolytic enzymes and transformed with plasmids overexpressing one or more chaperone proteins are used as host cells in the expression system of the invention.

[0662] c. Masked Cytokine Purification

[0663] In some embodiments, the masked cytokine produced herein is further purified to obtain preparations that are substantially homogeneous for further assays and uses. Standard protein purification methods known in the art can be employed. The following procedures are exemplary of suitable purification procedures: fractionation on immunoaffinity or ion-exchange columns, ethanol precipitation, reverse phase HPLC, chromatography on silica or on a cation-exchange resin such as DEAE, chromatofocusing, SDS-PAGE, ammonium sulfate precipitation, and gel filtration using, for example, Sephadex G-75.

[0664] In some embodiments, Protein A immobilized on a solid phase is used for immunoaffinity purification of the masked cytokines of the invention. Protein A is a 41 kD cell wall protein from Staphylococcus aureas which binds with a high affinity to the Fc region of antibodies. Lindmark et al (1983) J. Immunol. Meth. 62:1-13. The solid phase to which Protein A is immobilized can be a column comprising a glass or silica surface, or a controlled pore glass column or a silicic acid column. In some applications, the column is coated with a reagent, such as glycerol, to possibly prevent nonspecific adherence of contaminants.

[0665] As the first step of purification, a preparation derived from the cell culture as described above can be applied onto a Protein A immobilized solid phase to allow specific binding of the masked cytokine of interest to Protein A. The solid phase would then be washed to remove contaminants non-specifically bound to the solid phase. Finally, the masked cytokine of interest is recovered from the solid phase by elution.

[0666] Other methods of purification that provide for high affinity binding to a component of the masked cytokine can be employed in accordance with standard protein purification methods known in the art.

[0667] 2. Generating Masked Cytokines Using Eukaryotic Host Cells

[0668] A vector for use in a eukaryotic host cell generally includes one or more of the following non-limiting components: a signal sequence, an origin of replication, one or more marker genes, an enhancer element, a promoter, and a transcription termination sequence.

[0669] a. Signal Sequence Component

[0670] A vector for use in a eukaryotic host cell may also contain a signal sequence or other polypeptide having a specific cleavage site at the N-terminus of the mature protein or polypeptide of interest. The heterologous signal sequence selected may be one that is recognized and processed (i.e., cleaved by a signal peptidase) by the host cell. In mammalian cell expression, mammalian signal sequences as well as viral secretory leaders, for example, the herpes simplex gD signal, are available.

[0671] The DNA for such a precursor region is ligated in reading frame to DNA encoding the masked cytokine.

[0672] b. Origin of Replication

[0673] Generally, an origin of replication component is not needed for mammalian expression vectors. For example, the SV40 origin may typically be used only because it contains the early promoter.

[0674] c. Selection Gene Component

[0675] Expression and cloning vectors may contain a selection gene, also termed a selectable marker. Typical selection genes encode proteins that (a) confer resistance to antibiotics or other toxins, e.g., ampicillin, neomycin, methotrexate, or tetracycline, (b) complement auxotrophic deficiencies, where relevant, or (c) supply critical nutrients not available from complex media.

[0676] One example of a selection scheme utilizes a drug to arrest growth of a host cell. Those cells that are successfully transformed with a heterologous gene produce a protein conferring drug resistance and thus survive the selection regimen. Examples of such dominant selection use the drugs neomycin, mycophenolic acid and hygromycin.

[0677] Another example of suitable selectable markers for mammalian cells are those that enable the identification of cells competent to take up the masked cytokine encoding nucleic acid, such as DHFR, thymidine kinase, metallothionein-I and -II, primate metallothionein genes, adenosine deaminase, ornithine decarboxylase, etc.

[0678] For example, in some embodiments, cells transformed with the DHFR selection gene are first identified by culturing all of the transformants in a culture medium that contains methotrexate (Mtx), a competitive antagonist of DHFR. In some embodiments, an appropriate host cell when wild-type DHFR is employed is the Chinese hamster ovary (CHO) cell line deficient in DHFR activity (e.g., ATCC CRL-9096).

[0679] Alternatively, host cells (particularly wild-type hosts that contain endogenous DHFR) transformed or co-transformed with DNA sequences encoding a masked cytokine, wild-type DHFR protein, and another selectable marker such as aminoglycoside 3′-phosphotransferase (APH) can be selected by cell growth in medium containing a selection agent for the selectable marker such as an aminoglycosidic antibiotic, e.g., kanamycin, neomycin, or G418. See U.S. Pat. No. 4,965,199. Host cells may include NS0, including cell lines deficient in glutamine synthetase (GS). Methods for the use of GS as a selectable marker for mammalian cells are described in U.S. Pat. Nos. 5,122,464 and 5,891,693.

[0680] d. Promoter Component

[0681] Expression and cloning vectors usually contain a promoter that is recognized by the host organism and is operably linked to nucleic acid encoding a masked cytokine of interest, which can be any masked cytokine described herein. Promoter sequences are known for eukaryotes. For example, virtually all eukaryotic genes have an AT-rich region located approximately 25 to 30 bases upstream from the site where transcription is initiated. Another sequence found 70 to 80 bases upstream from the start of transcription of many genes is a CNCAAT region where N may be any nucleotide. At the 3′ end of most eukaryotic genes is an AATAAA sequence that may be the signal for addition of the poly A tail to the 3′ end of the coding sequence. In certain embodiments, any or all of these sequences may be suitably inserted into eukaryotic expression vectors.

[0682] Transcription from vectors in mammalian host cells is controlled, for example, by promoters obtained from the genomes of viruses such as polyoma virus, fowlpox virus, adenovirus (such as Adenovirus 2), bovine papilloma virus, avian sarcoma virus, cytomegalovirus, a retrovirus, hepahtis-B virus and Simian Virus 40 (SV40), from heterologous mammalian promoters, e.g., the actin promoter or an immunoglobulin promoter, from heat-shock promoters, provided such promoters are compatible with the host cell systems.

[0683] The early and late promoters of the SV40 virus are conveniently obtained as an SV40 restrichon fragment that also contains the SV40 viral origin of replication. The immediate early promoter of the human cytomegalovirus is conveniently obtained as a HindIII E restriction fragment. A system for expressing DNA in mammalian hosts using the bovine papilloma virus as a vector is disclosed in U.S. Pat. No. 4,419,446. A modification of this system is described in U.S. Pat. No. 4,601,978. See also Reyes et ah, Nature 297:598-601 (1982), describing expression of human [3-interferon cDNA in murine cells under the control of a thymidine kinase promoter from herpes simplex virus. Alternatively, the Rous Sarcoma Virus long terminal repeat can be used as the promoter.

[0684] e. Enhancer Element Component

[0685] Transcription of DNA encoding a masked cytokine of this invention by higher eukaryotes is often increased by inserting an enhancer sequence into the vector. Many enhancer sequences are now known from mammalian genes (globin, elastase, albumin, a-fetoprotein, and insulin). Typically, however, one will use an enhancer from a eukaryotic cell virus. Examples include the SV40 enhancer on the late side of the replication origin (bp 100-270), the human cytomegalovirus early promoter enhancer, the murine cytomegalovirus early promoter enhancer, the polyoma enhancer on the late side of the replication origin, and adenovirus enhancers. e also Yaniv, Nature 297:17-18 (1982) (describing enhancer elements for activation of eukaryotic promoters). The enhancer may be spliced into the vector at a position 5′ or 3′ to the masked cytokine-encoding sequence, but is generally located at a site 5′ from the promoter.

[0686] f. Transcription Termination Component

[0687] Expression vectors used in eukaryotic host cells may also contain sequences necessary for the termination of transcription and for stabilizing the mRNA. Such sequences are commonly available from the 5′ and, occasionally 3′, untranslated regions of eukaryotic or viral DNAs or cDNAs. These regions contain nucleotide segments transcribed as polyadenylated fragments in the untranslated portion of the mRNA encoding a masked cytokine. One useful transcription termination component is the bovine growth hormone polyadenylation region. See WO94/11026 and the expression vector disclosed therein.

[0688] g. Selection and Transformation of Host Cells

[0689] Suitable host cells for cloning or expressing the DNA in the vectors herein include higher eukaryote cells described herein, including vertebrate host cells. Propagation of vertebrate cells in culture (tissue culture) has become a routine procedure. Examples of useful mammalian host cell lines are monkey kidney CV1 line transformed by SV40 (COS-7. ATCC CRL 1651); human embryonic kidney line (293 or 293 cells subcloned for growth in suspension culture, Graham et ah, J. Gen Virol. 36:59(1977)); baby hamster kidney cells (BHK, ATCC CCL 10); Chinese hamster ovary cells/-DHFR (CHO, Urlaub et ah, Proc. Natl. Acad. Sci. USA 77:4216 (1980)); murine sertoli cells (TM4, Mather, Biol. Reprod. 23:243-251 (1980)); monkey kidney cells (CV1 ATCC CCL 70); African green monkey kidney cells (VERO-76, ATCC CRL-1587); human cervical carcinoma cells (HELA, ATCC CCL 2); canine kidney cells (MDCK, ATCC CCL 34); buffalo rat liver cells (BEL 3A, ATCC CRL 1442); human lung cells (W138, ATCC CCL 75); human liver cells (Hep G2, HB 8065); murine mammary tumor (MMT 060562, ATCC CCL51); TRI cells (Mather et ah, Annals N.Y. Acad. Sci. 383:44-68 (1982)); MRC 5 cells; FS4 cells; and a human hepatoma line (Hep G2).

[0690] Host cells are transformed with the above-described-expression or cloning vectors for masked cytokine production and cultured in conventional nutrient media modified as appropriate for inducing promoters, selecting transformants, or amplifying the genes encoding the desired sequences.

[0691] h. Culturing Host Cells

[0692] The host cells used to produce masked cytokines of this invention may be cultured in a variety of media.

[0693] Commercially available media such as Ham's F10 (Sigma), Minimal Essential Medium ((MEM), Sigma), RPMI-1640 (Sigma), and Dulbecco's Modified Eagle's Medium ((DMEM). Sigma) are suitable for culturing the host cells. In addition, any of the media described in Ham et ah. Meth. Enz. 58:44 (1979), Barnes et ah, Anal. Biochem. 102:255 (1980), U.S. Pat. Nos. 4,767,704; 4,657,866; A; 921,162, 4,560,655; or 5,122,469; WO 90/03430; WO 87/00195; or U.S. Pat. Re. 30,985 may be used as culture media for the host cells. Any of these media may be supplemented as necessary with hormones and/or other growth factors (such as insulin, transferrin, or epidermal growth factor), salts (such as sodium chloride, calcium, magnesium, and phosphate), buffers (such as HEPES), nucleotides (such as adenosine and thymidine), antibiotics (such as GENTAMYCIN™ drug), trace elements (defined as inorganic compounds usually present at final concentrations in the micromolar range), and glucose or an equivalent energy source. Any other supplements may also be included at appropriate concentrations that would be known to those skilled in the art. The culture conditions, such as temperature. pH, and the like, are those previously used with the host cell selected for expression, and will be apparent to the ordinarily skilled artisan.

[0694] i. Purification of Masked Cytokines

[0695] When using recombinant techniques, the masked cytokines can be produced intracellularly, or directly secreted into the medium. If the masked cytokine is produced intracellularly, as a first step, the particulate debris, either host cells or lysed fragments, may be removed, for example, by centrifugation or ultrafiltration. Where the masked cytokine is secreted into the medium, supernatants from such expression systems may be first concentrated using a commercially available protein concentration filter, for example, an Amicon or Millipore Pellicon ultrafiltration unit. A protease inhibitor such as PMSF may be included in any of the foregoing steps to inhibit proteolysis, and antibiotics may be included to prevent the growth of adventitious contaminants.

[0696] The masked cytokine composition prepared from the cells can be purified using, for example, hydroxylapatite chromatography, gel electrophoresis, dialysis, and affinity chromatography, with affinity chromatography being a convenient technique. The suitability of protein A as an affinity ligand depends on the species and isotype of any immunoglobulin Pc domain, if any, that is present in the masked cytokine. Protein A can be used to purify antibodies that are based on human IgG1. IgG2, or IgG4 heavy chains (Lindmark et ak, J. Immunol. Methods 62:1-13 (1983)). Protein G is recommended for all murine isotypes and for human y3 (Guss et ak, EMBO J. 5:15671575 (1986)). The matrix to which the affinity ligand is attached may be agarose, but other matrices are available. Mechanically stable matrices such as controlled pore glass or poly(styrenedivinyl)benzene allow for faster flow rates and shorter processing times than can be achieved with agarose. Where the masked cytokine comprises a CH3 domain, the Bakerbond ABX™ resin (J. T. Baker, Phillipsburg, N.J.) is useful for purification.

[0697] Other techniques for protein purification such as fractionahon on an ion-exchange column, ethanol precipitation, Reverse Phase HPLC, chromatography on silica, chromatography on heparin SEPHAROSE™ chromatography on an anion or cation exchange resin (such as a polyaspartic acid column), chromatofocusing, SDS-PAGE, and ammonium sulfate precipitation are also available depending on the masked cytokine to be recovered.

[0698] Following any preliminary purification step(s), the mixture comprising the masked cytokine of interest and contaminants may be subjected to further purification, for example, by low pH hydrophobic interaction chromatography using an elution buffer at a pH between about 2.5-4.5, performed at low salt concentrations (e.g., from about 0-0.25M salt).

[0699] in general, various methodologies for preparing masked cytokines for use in research, testing, and clinical use are well-established in the art, consistent with the above-described methodologies and/or as deemed appropriate by one skilled in the art for a particular masked cytokine of interest.

### 5. Compositions

[0700] In some aspects, also provided herein are compositions comprising any of the masked cytokines described herein. In some embodiments, the composition comprises any of the exemplary embodiments of masked cytokine described herein. In some embodiments, the composition comprises a dimer of any of the masked cytokines described herein. In some embodiments, the composition is a pharmaceutical composition. In some embodiments, the composition comprises a masked cytokine and further comprises one or more of the components as described in detail below. For example, in some embodiments, the composition comprises one or more pharmaceutically acceptable carriers, excipients, stabilizers, buffers, preservatives, tonicity agents, non-ionic surfactants or detergents, or other therapeutic agents or active compounds, or combinations thereof. The various embodiments of the composition are sometimes referred to herein as formulations.

[0701] Therapeutic formulations are prepared for storage by mixing the active ingredient having the desired degree of purity with optional pharmaceutically acceptable carriers, excipients or stabilizers (Remington: The Science and Practice of Pharmacy, 20th Ed., Lippincott Williams & Wilkins, Pub., Gennaro Ed., Philadelphia, Pa. 2000). Acceptable carriers, excipients, or stabilizers are nontoxic to recipients at the dosages and concentrations employed, and include buffers, antioxidants including ascorbic acid, methionine. Vitamin E, sodium metabisulfite; preservatives, isotonicifiers, stabilizers, metal complexes (e.g. Zn-protein complexes); chelating agents such as EDTA and/or non-ionic surfactants.

[0702] Buffers can be used to control the pH in a range which optimizes the therapeutic effectiveness, especially if stability is pH dependent. Buffers can be present at concentrations ranging from about 50 mM to about 250 mM. Suitable buffering agents for use with the present invention include both organic and inorganic acids and salts thereof. For example, citrate, phosphate, succinate, tartrate, fumarate, gluconate, oxalate, lactate, acetate. Additionally, buffers may be comprised of histidine and trimethylamine salts such as Tris.

[0703] Preservatives can be added to prevent microbial growth, and are typically present in a range from about 0.2%-1.0% (w/v). Examples of suitable preservatives commonly used with therapeutics include octadecyldimethylbenzyl ammonium chloride; hexamethonium chloride; benzalkonium halides (e.g., chloride, bromide, iodide), benzethonium chloride; thimerosal, phenol, butyl or benzyl alcohol; alkyl parabens such as methyl or propyl paraben; catechol; resorcinol; cyclohexanol, 3-pentanol, m-cresol, o-cresol, p-cresol, methyl p-hydroxybenzoate, propyl p-hydroxybenzoate, 2-phenoxyethanol, butyl p-hydroxybenzoate, 2-phenylethanol, ethanol, chlorobutanol, thiomerosal, bronopol, benzoic acid, imidurea, chlorohexidine, sodium dehydroacetate, chlorocresol, ethyl p-hydroxybenzoate, and chlorphenesine (3p-chlorphenoxypropane-1,2-diol).

[0704] Tonicity agents, sometimes known as “stabilizers” can be present to adjust or maintain the tonicity of liquid in a composition. When used with large, charged biomolecules such as proteins and antibodies, they are often termed “stabilizers” because they can interact with the charged groups of the amino acid side chains, thereby lessening the potential for inter and intra-molecular interactions.

[0705] Tonicity agents can be present in any amount between about 0.1% to about 25% by weight or between about 1 to about 5% by weight, taking into account the relative amounts of the other ingredients. In some embodiments, tonicity agents include polyhydric sugar alcohols, trihydric or higher sugar alcohols, such as glycerin, erythritol, arabitol, xylitol, sorbitol and mannitol.

[0706] Additional excipients include agents which can serve as one or more of the following: (1) bulking agents, (2) solubility enhancers. (3) stabilizers and (4) and agents preventing denaturation or adherence to the container wall. Such excipients include: polyhydric sugar alcohols (enumerated above); amino acids such as alanine, glycine, glutamine, asparagine, histidine, arginine, lysine, ornithine, leucine, 2-phenylalanine, glutamic acid, threonine, etc.; organic sugars or sugar alcohols such as sucrose, lactose, lactitol, trehalose, stachyose, mannose, sorbose, xylose, ribose, ribitol, myoinisitose, myoinisitol, galactose, galactitol, glycerol, cyclitols (e.g., inositol), polyethylene glycol; sulfur containing reducing agents, such as urea, glutathione, thioctic acid, sodium thioglycolate, thioglycerol, a-monothioglycerol and sodium thio sulfate; low molecular weight proteins such as human serum albumin. bovine serum albumin, gelatin or other immunoglobulins; hydrophilic polymers such as polyvinylpyrrolidone; monosaccharides (e.g., xylose, mannose, fructose, glucose; disaccharides (e.g., lactose, maltose, sucrose); trisaccharides such as raffinose; and polysaccharides such as dextrin or dextran.

[0707] Non-ionic surfactants or detergents (also known as “wetting agents”) can be present to help solubilize the therapeutic agent as well as to protect the therapeutic protein against agitation-induced aggregation, which also permits the formulation to be exposed to shear surface stress without causing denaturation of the active therapeutic protein or antibody. Non-ionic surfactants are present in a range of about 0.05 mg/mi to about 1.0 mg/ml or about 0.07 mg/ml to about 0.2 mg/ml. In some embodiments, non-ionic surfactants are present in a range of about 0.001% to about 0.1% w/v or about 0.01% to about 0.1% w/v or about 0.01% to about 0.025% w/v.

[0708] Suitable non-ionic surfactants include polysorbates (20, 40, 60, 65, 80, etc.), polyoxamers (184, 188, etc.), PLURONIC® polyols, TRITON®, polyoxyethylene sorbitan monoethers (TWEEN®-20, TWEEN®-80, etc.), lauromacrogol 400, polyoxyl 40 stearate, polyoxyethylene hydrogenated castor oil 10, 50 and 60, glycerol monostearate, sucrose fatty acid ester, methyl celluose and carboxymethyl cellulose. Anionic detergents that can be used include sodium lauryl sulfate, dioctyle sodium sulfosuccinate and dioctyl sodium sulfonate. Cationic detergents include benzalkonium chloride or benzethonium chloride.

[0709] In order for the formulations to be used for in vivo administration, they must be sterile. The formulation may be rendered sterile by filtration through sterile filtration membranes. The therapeutic compositions herein generally are placed into a container having a sterile access port, for example, an intravenous solution bag or vial having a stopper pierceable by a hypodermic injection needle.

[0710] The route of administration is in accordance with known and accepted methods, such as by single or multiple bolus or infusion over a long period of time in a suitable manner, e.g., injection or infusion by subcutaneous, intravenous, intraperitoneal, intramuscular, intraarterial, intralesional or intraarticular routes, topical administration, inhalation or by sustained release or extended-release means.

[0711] Any of the masked cytokines described herein can be used alone or in combination with other therapeutic agents such is in the methods described herein. The term “in combination with” encompasses two or more therapeutic agents (e.g., a masked cytokine and a therapeutic agent) that are included in the same or separate formulations. In some embodiments, “in combination with” refers to “simultaneous” administration, in which case administration of the masked cytokine of the invention occurs simultaneously to the administration of the one or more additional therapeutic agents (e.g., at the same time or within one hour between administration (s) of the masked cytokine and administration of the one or more additional therapeutic agents). In some embodiments, “in combination with” refers to sequential administration, in which case administration of the masked cytokine of the invention occurs prior to and/or following, administration of the one or more additional therapeutic agents (e.g., greater than one hour between administration (s) of the masked cytokine and administration of the one or more additional therapeutic agents). Agents contemplated herein include, but are not limited to, a cytotoxic agent, a cytokine, an agent targeting an immune checkpoint molecule, an agent targeting an immune stimulatory molecule, a growth inhibitory agent, an immune stimulatory agent, an anti-inflammatory agent, or an anti-cancer agent.

[0712] The formulation herein may also contain more than one active compound as necessary for the particular indication being treated, preferably those with complementary activities that do not adversely affect each other. Alternatively, or in addition, the composition may comprise a cytotoxic agent, cytokine, agent targeting an immune checkpoint molecule or stimulatory molecule, growth inhibitory agent, an immune stimulatory agent, an anti-inflammatory agent, or an anti-cancer agent. Such molecules are suitably present in combination in amounts that are effective for the purpose intended.

[0713] The formulation may be presented in any suitable state, such as a liquid formulation, a solid state (lyophilized) formulation, or a frozen formulation. Approaches for preparing each of these types of formulations for therapeutic use are well known in the art.

### 6. Methods of Treatment

[0714] Provided herein are methods for treating or preventing a disease in a subject comprising administering to the subject an effective amount of any masked cytokine described herein or compositions thereof. In some embodiments, methods are provided for treating or preventing a disease in a subject comprising administering to the subject any composition described herein. In some embodiments, the subject (e.g., a human patient) has been diagnosed with cancer or is at risk of developing such a disorder. In some embodiments, methods are provided for treating or preventing disease in a subject comprising administering to the subject an effective amount of any masked cytokine described herein or compositions thereof, wherein the masked cytokine is activated upon cleavage by an enzyme. In some embodiments, the masked cytokine is activated at a tumor microenvironment. The masked cytokine is therapeutically active after it has cleaved. Thus, in some embodiments, the active agent is the cleavage product.

[0715] For the prevention or treatment of disease, the appropriate dosage of an active agent will depend on the type of disease to be treated, as defined herein, the severity and course of the disease, whether the agent is administered for preventive or therapeutic purposes, previous therapy, the subject's clinical history and response to the agent, and the discretion of the attending physician. The agent is suitably administered to the subject at one time or over a series of treatments.

[0716] In some embodiments, the protease acting to cleave the proteolytically cleavable peptide is an MMP.

[0717] In some embodiments of the methods described herein, an interval between administrations of a masked cytokine described herein is about one week or longer. In some embodiments of the methods described herein, an interval between administrations of a masked cytokine described herein is about two days or longer, about three days or longer, about four days or longer, about five days or longer, or about six days or longer. In some embodiments of the methods described herein, an interval between administrations of a masked cytokine described herein is about one week or longer, about two weeks or longer, about three weeks or longer, or about four weeks or longer. In some embodiments of the methods described herein, an interval between administrations of a masked cytokine described herein is about one month or longer, about two months or longer, or about three months or longer. As used herein, an interval between administrations refers to the time period between one administration of the masked cytokine and the next administration of the masked cytokine. As used herein, an interval of about one month includes four weeks. In some embodiments, the treatment includes multiple administrations of the masked cytokine, wherein the interval between administrations may vary. For example, in some embodiments, the interval between the first administration and the second administration is about one week, and the intervals between the subsequent administrations are about two weeks. In some embodiments, the interval between the first administration and the second administration is about two days, three days, four days, or five days, or six days, and the intervals between the subsequent administrations are about one week.

[0718] In some embodiments, the masked cytokine is administered on multiple occasions over a period of time. The dosage that is administered to the subject on multiple occasions can. In some embodiments, be the same dosage for each administration, or, in some embodiments, the masked cytokine can be administered to the subject at two or more different dosages. For example, in some embodiments, a masked cytokine is initially administered at one dosage on one or more occasions and is later administered at a second dosage on one or more occasions beginning at a later time point.

[0719] In some embodiments, a masked polypeptide described herein is administered at a flat dose. In some embodiments, a masked polypeptide described herein is administered to a subject at a dosage from about 25 mg to about 500 mg per dose. In some embodiments, the masked polypeptide is administered to a subject at a dosage of about 25 mg to about 50 mg, about 50 mg to about 75 mg, about 75 mg to about 100 mg, about 100 mg to about 125 mg, about 125 mg to about 150 mg, about 150 mg to about 175 mg, about 175 mg to about 200 mg, about 200 mg to about 225 mg, about 225 mg to about 250 mg, about 250 mg to about 275 mg, about 275 mg to about 300 mg, about 300 mg to about 325 mg, about 325 mg to about 350 mg, about 350 mg to about 375 mg, about 375 mg to about 400 mg, about 400 mg to about 425 mg, about 425 mg to about 450 mg, about 450 mg, to about 475 mg, or about 475 mg to about 500 mg per dose.

[0720] In some embodiments, a masked polypeptide described herein is administered to a subject at a dosage based on the subject's weight or body surface area (BSA). Depending on the type and severity of the disease, about 1 sg/kg to 15 mg/kg (e.g. 0.1 mg/kg-10 mg/kg) of masked polypeptide can be an initial candidate dosage for administration to the patient, whether, for example, by one or more separate administrations, or by continuous infusion. One typical daily dosage might range from about 1 μg/kg to 100 mg/kg or more, depending on the factors mentioned above. For repeated administrations over several days or longer, depending on the condition, the treatment would generally be sustained until a desired suppression of disease symptoms occurs. One exemplary dosage of the masked polypeptide would be in the range from about 0.05 mg/kg to about 10 mg/kg. Thus, one or more doses of about 0.5 mg/kg, 2.0 mg/kg, 4.0 mg/kg or 10 mg/kg (or any combination thereof) may be administered to the patient. In some embodiments, a masked polypeptide described herein is administered to a subject at a dosage from about 0.1 mg/kg to about 10 mg/kg or about 1.0 mg/kg to about 10 mg/kg. In some embodiments, a masked polypeptide described herein is administered to a subject at a dosage of about any of 0.1 mg/kg, 0.5 mg/kg, 1.0 mg kg, 1.5 mg/kg, 2.0 mg/kg, 2.5 mg/kg, 3.0 mg/kg, 3.5 mg/kg, 4.0 mg/kg, 4.5 mg/kg, 5.0 mg/kg, 5.5 mg/kg, 6.0 mg/kg, 6.5 mg/kg, 7.0 mg/kg, 7.5 mg/kg, 8.0 mg/kg, 8.5 mg/kg, 9.0 mg/kg, 9.5 mg/kg, or 10.0 mg/kg. In some embodiments, a masked polypeptide described herein is administered to a subject at a dosage of about or at least about 0.1 mg/kg, about or at least about 0.5 mg/kg, about or at least about 1.0 mg/kg, about or at least about 1.5 mg/kg, about or at least about 2.0 mg/kg, about or at least about 2.5 mg/kg, about or at least about 3.0 mg/kg, about or at least about 3.5 mg/kg, about or at least about 4.0 mg/kg, about or at least about 4.5 mg/kg, about or at least about 5.0 mg/kg, about or at least about 5.5 mg/kg, about or at least about 6.0 mg/kg, about or at least about 6.5 mg/kg, about or at least about 7.0 mg/kg, about or at least about 7.5 mg/kg, about or at least about 8.0 mg/kg, about or at least about 8.5 mg/kg, about or at least about 9.0 mg/kg, about or at least about 9.5 mg/kg, about or at least about 10.0 mg/kg, about or at least about 15.0 mg/kg, about or at least about 20 mg/kg, about or at least about 30 mg/kg, about or at least about 40 mg/kg, about or at least about 50 mg/kg, about or at least about 60 mg/kg, about or at least about 70 mg/kg, about or at least about 80 mg/kg, about or at least about 90 mg/kg, or about or at least about 100 mg/kg. Any of the dosing frequencies described above may be used.

[0721] A method of treatment contemplated herein is the treatment of a disorder or disease such as cancer with any of the masked cytokines or compositions described herein. Disorders or diseases that are treatable with the formulations of this present invention include leukemia, lymphoma, head and neck cancer, colorectal cancer, prostate cancer, pancreatic cancer, melanoma, breast cancer, neuroblastoma, lung cancer, ovarian cancer, osteosarcoma, bladder cancer, cervical cancer, liver cancer, kidney cancer, skin cancer (e.g., Merkel cell carcinoma) or testicular cancer.

[0722] In some embodiments, provided herein is a method of treatment or prevention of a cancer by administration of any masked cytokines or compositions described herein. In some embodiments, provided herein is a method of treatment or prevention of a cancer by administration of any masked cytokine or composition described herein in combination with an anticancer agent. The anti-cancer agent can be any agent capable of reducing cancer growth, interfering with cancer cell replication, directly or indirectly killing cancer cells, reducing metastasis, reducing tumor blood supply, or reducing cell survival. In some embodiments, the anti-cancer agent is selected from the group consisting of a PD-1 inhibitor, an EGFR inhibitor, a HER2 inhibitor, a VEGFR inhibitor, a CTLA-4 inhibitor, a BTLA inhibitor, a B7H4 inhibitor, a B7H3 inhibitor, a CSFIR inhibitor, an HVEM inhibitor, a CD27 inhibitor, a KIR inhibitor, an NKG2A inhibitor, an NKG2D agonist, a TWEAK inhibitor, an ALK inhibitor, a CD52 targeting antibody, a CCR4 targeting antibody, a PD-L1 inhibitor, a KIT inhibitor, a PDGFR inhibitor, a BAFF inhibitor, an HD AC inhibitor, a VEGF ligand inhibitor, a CD19 targeting molecule, a FOFR1 targeting molecule, a DFF3 targeting molecule, a DKK1 targeting molecule, a MUC1 targeting molecule, a MUG 16 targeting molecule, a PSMA targeting molecule, an MSFN targeting molecule, an NY-ES0-1 targeting molecule, a B7H3 targeting molecule, a B7H4 targeting molecule, a BCMA targeting molecule, a CD29 targeting molecule, a CD151 targeting molecule, a CD123 targeting molecule, a CD33 targeting molecule, a CD37 targeting molecule, a CDH19 targeting molecule, a CEA targeting molecule, a Claudin 18.2 targeting molecule, a CFEC12A targeting molecule, an EGFRVIII targeting molecule, an EPCAM targeting molecule, an EPHA2 targeting molecule, an FCRH5 targeting molecule, an FLT3 targeting molecule, a GD2 targeting molecule, a glypican 3 targeting molecule, a gpA33 targeting molecule, a GPRC5D targeting molecule, an IL-23R targeting molecule, an IL-1RAP targeting molecule, a MCSP targeting molecule, a RON targeting molecule, a ROR1 targeting molecule, a STEAP2 targeting molecule, a TfR targeting molecule, a CD166 targeting molecule, a TPBG targeting molecule, a TROP2 targeting molecule, a proteasome inhibitor, an ABE inhibitor, a CD30 inhibitor, a FLT3 inhibitor, a MET inhibitor, a RET inhibitor, an IL-1(3 inhibitor, a MEK inhibitor, a ROS1 inhibitor, a BRAE inhibitor, a CD38 inhibitor, a RANKE inhibitor, a B4GALNT1 inhibitor, a SLAMF7 inhibitor, an IDH2 inhibitor, an mTOR inhibitor, a CD20 targeting antibody, a BTK inhibitor, a PI3K inhibitor, a FLT3 inhibitor, a PARP inhibitor, a CDK4 inhibitor, a CDK6 inhibitor, an EGFR inhibitor, a RAF inhibitor, a JAK1 inhibitor, a JAK2 inhibitor, a JAK3 inhibitor, an IL-6 inhibitor, a IL-17 inhibitor, a Smoothened inhibitor, an IL-6R inhibitor, a BCL2 inhibitor, a PTCH inhibitor, a PIGF inhibitor, a TGFB inhibitor, a CD28 agonist, a CD3 agonist, CD40 agonist, a GITR agonist, a 0X40 agonist, a VISTA agonist, a CD137 agonist, a LAG3 inhibitor, a TIM3 inhibitor, a TIGIT inhibitor, and an IL-2R inhibitor.

[0723] In some embodiments, provided herein is a method of treatment or prevention of a cancer by administration of any masked cytokine described herein in combination with an anti-inflammatory agent. The anti-inflammatory agent can be any agent capable of preventing, counteracting, inhibiting, or otherwise reducing inflammation.

[0724] In some embodiments, the anti-inflammatory agent is a cyclooxygenase (COX) inhibitor. The COX inhibitor can be any agent that inhibits the activity of COX-1 and/or COX-2. In some embodiments, the COX inhibitor selectively inhibits COX-1 (i.e., the COX inhibitor inhibits the activity of COX-1 more than it inhibits the activity of COX-2). In some embodiments, the COX inhibitor selectively inhibits COX-2 (i.e., the COX inhibitor inhibits the activity of COX-2 more than it inhibits the activity of COX-1). In some embodiments, the COX inhibitor inhibits both COX-1 and COX-2.

[0725] In some embodiments, the COX inhibitor is a selective COX-1 inhibitor and is selected from the group consisting of SC-560, FR122047, P6, mofezolac, TFAP, flurbiprofen, and ketoprofen. In some embodiments, the COX inhibitor is a selective COX-2 inhibitor and is selected from the group consisting of celecoxib, rofecoxib, meloxicam, piroxicam, deracoxib, parecoxib, valdecoxib, etoricoxib, a chromene derivative, a chroman derivative, N-(2-cyclohexyloxynitrophenyl) methane sulfonamide, parecoxib, lumiracoxib, RS 57067, T-614. BMS-347070, JTE-522, S-2474. SVT-2016, CT-3, ABT-963, SC-58125, nimesulide, flosulide, NS-398, L-745337, RWJ-63556, L-784512, darbufelone, CS-502, LAS-34475, LAS-34555, S-33516, diclofenac, mefenamic acid, and SD-8381. In some embodiments, the COX inhibitor is selected from the group consisting of ibuprofen, naproxen, ketorolac, indomethacin, aspirin, naproxen, tolmetin, piroxicam, and meclofenamate. In some embodiments, the COX inhibitor is selected from the group consisting of SC-560, FR122047, P6, mofezolac, TFAP, flurbiprofen, ketoprofen, celecoxib, rofecoxib, meloxicam, piroxicam, deracoxib, parecoxib, valdecoxib, etoricoxib, a chromene derivative, a chroman derivative, N-(2-cyclohexyloxynitrophenyl) methane sulfonamide, parecoxib, lumiracoxib, RS 57067, T-614, BMS-347070, JTE-522, S-2474, SVT-2016, CT-3, ABT-963, SC-58125, nimesulide, flosulide, NS-398, L-745337, RWJ-63556, L-784512, darbufelone, CS-502, LAS-34475, LAS-34555, S-33516, diclofenac, mefenamic acid, SD-8381, ibuprofen, naproxen, ketorolac, indomethacin, aspirin, naproxen, tolmetin, piroxicam, and meclofenamate.

[0726] In some embodiments, the anti-inflammatory agent is an NF-κB inhibitor. The NF-κB inhibitor can be any agent that inhibits the activity of the NF-κB pathway. In some embodiments, the NF-κB inhibitor is selected from the group consisting of an IKK complex inhibitor, an IκB degradation inhibitor, an NF-κB nuclear translocation inhibitor, a p65 acetylation inhibitor, an NF-κB DNA binding inhibitor, an NF-κB transactivation inhibitor, and a p53 induction inhibitor.

[0727] In some embodiments, the IKK complex inhibitor is selected from the group consisting of TPCA-1. NF-κB Activation Inhibitor VI (BOT-64), BMS-345541, amlexanox, SC-514 (GK-01140), IMD-0354, and IKK-16. In some embodiments, the IκB degradation inhibitor is selected from the group consisting of BAY-IL-7082. MG-115. MG-132, lactacystin, epoxomicin, parthenolide, carfilzomib, and MLN-4924 (pevonedistat). In some embodiments, the NF-κB nuclear translocation inhibitor is selected from the group consisting of JSH-23 and rolipram. In some embodiments, the p65 acetylation inhibitor is selected from the group consisting of gallic acid and anacardic acid. In some embodiments, the NF-κB DNA binding inhibitor is selected from the group consisting of GYY-4137, p-XSC, CV-3988, and prostaglandin E2 (PGE2). In some embodiments, the NF-κB transactivation inhibitor is selected from the group consisting of LY-294002, wortmannin, and mesalamine. In some embodiments, the p53 induction inhibitor is selected from the group consisting of quinacrine and flavopiridol. In some embodiments, the NF-κB inhibitor is selected from the group consisting of TPCA-1, NF-κB Activation Inhibitor VI (BOT-64), BMS-345541, amlexanox, SC-514 (GK-01140), IMD-0354, IKK-16, BAY-11-7082, MG-115, MG-132, lactacystin, epoxomicin, parthenolide, carfilzomib, MLN-4924 (pevonedistat), JSH-23 rolipram, gallic acid, anacardic acid, GYY-4137, p-XSC, CV-3988, prostaglandin E2 (PGE2), LY-294002, wortmannin, mesalamine, quinacrine, and flavopiridol.

[0728] In some embodiments, provided herein is a method of treatment or prevention of a cancer by administration of any masked cytokine or composition described herein in combination with an anticancer therapeutic protein. The anti-cancer therapeutic protein can be any therapeutic protein capable of reducing cancer growth, interfering with cancer cell replication, directly or indirectly killing cancer cells, reducing metastasis, reducing tumor blood supply, or reducing cell survival. Exemplary anti-cancer therapeutic proteins may come in the form of an antibody or fragment thereof, an antibody derivative, a bispecific antibody, a chimeric antigen receptor (CAR) T cell, a fusion protein, or a bispecific T-cell engager (BiTE).

[0729] In some embodiments, provided herein is a method of treatment or prevention of a cancer by administration of any masked cytokine or composition described herein in combination with CAR-NK (Natural Killer) cells.

### 7. Articles of Manufacture or Kits

[0730] In another aspect, an article of manufacture or kit is provided which comprises any masked cytokine described herein. The article of manufacture or kit may further comprise instructions for use of the cytokines in the methods of the invention. Thus, in certain embodiments, the article of manufacture or kit comprises instructions for the use of a masked cytokine in methods for treating or preventing a disorder (e.g., a cancer) in an individual comprising administering to the individual an effective amount of a masked cytokine. For example, in certain embodiments, the article of manufacture or kit comprises instructions for the use of a masked polypeptide in methods for treating or preventing a disorder (e.g., a cancer) in an individual comprising administering to the individual an effective amount of a masked polypeptide. In certain embodiments, the individual is a human. In some embodiments, the individual has a disease selected from the group consisting of include leukemia, lymphoma, head and neck cancer, colorectal cancer, prostate cancer, pancreatic cancer, melanoma, breast cancer, neuroblastoma, lung cancer, ovarian cancer, osteosarcoma, bladder cancer, cervical cancer, liver cancer, kidney cancer, skin cancer or testicular cancer.

[0731] The article of manufacture or kit may further comprise a container. Suitable containers include, for example, bottles, vials (e.g., dual chamber vials), syringes (such as single or dual chamber syringes), test tubes, and intravenous (IV) bags. The container may be formed from a variety of materials such as glass or plastic. The container holds the formulation. In some embodiments, the formulation is a lyophilized formulation. In some embodiments, the formulation is a frozen formulation. In some embodiments, the formulation is a liquid formulation.

[0732] The article of manufacture or kit may further comprise a label or a package insert, which is on or associated with the container, may indicate directions for reconstitution and/or use of the formulation. The label or package insert may further indicate that the formulation is useful or intended for subcutaneous, intravenous, or other modes of administration for treating or preventing a disorder (e.g., a cancer) in an individual. The container holding the formulation may be a single-use vial or a multi-use vial, which allows for repeat administrations of the reconstituted formulation. The article of manufacture or kit may further comprise a second container comprising a suitable diluent. The article of manufacture or kit may further include other materials desirable from a commercial, therapeutic, and user standpoint, including other buffers, diluents, filters, needles, syringes, and package inserts with instructions for use.

[0733] In a specific embodiment, the present invention provides kits for a single dose-administration unit. Such kits comprise a container of an aqueous formulation of therapeutic cytokine, including both single or multi-chambered pre-filled syringes. Exemplary pre-filled syringes are available from Vetter GmbH, Ravensburg, Germany.

[0734] The article of manufacture or kit herein optionally further comprises a container comprising a second medicament, wherein the masked cytokine is a first medicament, and which article or kit further comprises instructions on the label or package insert for treating the subject with the second medicament, in an effective amount.

[0735] In another embodiment, provided herein is an article of manufacture or kit comprising the formulations described herein for administration in an auto-injector device. An auto-injector can be described as an injection device that upon activation, will deliver its contents without additional necessary action from the patient or administrator. They are particularly suited for self-medication of therapeutic formulations when the delivery rate must be constant and the time of delivery is greater than a few moments.

### 8. Definitions

[0736] Unless defined otherwise, all terms of art, notations and other technical and scientific terms or terminology used herein are intended to have the same meaning as is commonly understood by one of ordinary skill in the art to which the claimed subject matter pertains. In some cases, terms with commonly understood meanings are defined herein for clarity and/or for ready reference, and the inclusion of such definitions herein should not necessarily be construed to represent a substantial difference over what is generally understood in the art.

[0737] It is to be understood that this invention is not limited to particular compositions or biological systems, which can, of course, vary. It is also to be understood that the terminology used herein is for the purpose of describing particular embodiments only, and is not intended to be limiting. As used in this specification and the appended claims, the singular forms “a.” “an.” and “the” include plural referents unless the content clearly dictates otherwise.

[0738] The term “about” as used herein refers to the usual error range for the respective value readily known to the skilled person in this technical field. Reference to “about” a value or parameter herein includes (and describes) embodiments that are directed to that value or parameter per se.

[0739] It is understood that aspects and embodiments of the invention described herein include “comprising,” “consisting,” and “consisting essentially of” aspects and embodiments.

[0740] As used herein, the term “and/or” refers to any one of the items, any combination of the items, or all of the items with which the term is associated. For instance, the phrase “A, B, and/or C” is intended to encompass each of the following embodiments: A, B, and C; A, B, or C; A or B; A or C; B or C; A and B; A and C; B and C; A and B or C; B and A or C; C and A or B; A (alone); B (alone); and C (alone).

[0741] The term “antibody” includes polyclonal antibodies, monoclonal antibodies (including full length antibodies which have an immunoglobulin Fc region), antibody compositions with polyepitopic specificity, multispecific antibodies (e.g., bispecific antibodies, diabodies, and single-chain molecules, as well as antibody fragments (e.g., Fab, F(ab′)2, and Fv). The term “immunoglobulin” (Ig) is used interchangeably with “antibody” herein.

[0742] The term “diabodies” refers to small antibody fragments with two antigen-binding sites, which comprise a heavy chain variable (VH) domain connected to a light chain variable (VL) domain in the same polypeptide chain (VH-VL).

[0743] The basic 4-chain antibody unit is a heterotetrameric glycoprotein composed of two identical light (L) chains and two identical heavy (H) chains. An IgM antibody consists of 5 of the basic heterotetramer units along with an additional polypeptide called a J chain, and contains 10 antigen binding sites, while IgA antibodies comprise from 2-5 of the basic 4-chain units which can polymerize to form polyvalent assemblages in combination with the J chain. In the case of IgGs, the 4-chain unit is generally about 150,000 daltons. Each L chain is linked to an H chain by one covalent disulfide bond, while the two H chains are linked to each other by one or more disulfide bonds depending on the H chain isotype. Each H and L chain also has regularly spaced intrachain disulfide bridges. Each H chain has at the N-terminus, a variable domain (VH) followed by three constant domains (CH) for each of the a and y chains and four CH domains for p and s isotypes. Each L chain has at the N-terminus, a variable domain (VL) followed by a constant domain at its other end. The VL is aligned with the VH and the CL is aligned with the first constant domain of the heavy chain (CHI). Particular amino acid residues are believed to form an interface between the light chain and heavy chain variable domains. The pairing of a VH and VL together forms a single antigen-binding site. For the structure and properties of the different classes of antibodies, see e.g., Basic and Clinical Immunology, 8th Edition, Daniel P. Sties, Abba 1. Terr and Tristram G. Parsolw (eds). Appleton & Lange, Norwalk, Conn., 1994, page 71 and Chapter 6.

[0744] The L chain from any vertebrate species can be assigned to one of two clearly distinct types, called kappa and lambda, based on the amino acid sequences of their constant domains. Depending on the amino acid sequence of the constant domain of their heavy chains (CH), immunoglobulins can be assigned to different classes or isotypes. There are five classes of immunoglobulins: IgA, IgD, IgE, IgG and IgM, having heavy chains designated a, 8, e, y and p, respectively. The y and a classes are further divided into subclasses on the basis of relatively minor differences in the CH sequence and function, e.g., humans express the following subclasses: IgG1, IgG2, IgG3, IgG4, IgA1 and IgA2. IgG1 antibodies can exist in multiple polymorphic variants termed allotypes (reviewed in Jefferis and Lefranc 2009. mAbs Vol 1 issue 4 1-7) any of which are suitable for use in the invention. Common allotypic variants in human populations are those designated by the letters a,f,n,z.

[0745] An “isolated” antibody is one that has been identified, separated and/or recovered from a component of its production environment (e.g., naturally or recombinantly). In some embodiments, the isolated polypeptide is free of association with all other components from its production environment. Contaminant components of its production environment, such as that resulting from recombinant transfected cells, are materials that would typically interfere with research, diagnostic or therapeutic uses for the antibody, and may include enzymes, hormones, and other proteinaceous or non-proteinaceous solutes. In some embodiments, the polypeptide is purified: (1) to greater than 95% by weight of antibody as determined by, for example, the Lowry method, and In some embodiments, to greater than 99% by weight; (1) to a degree sufficient to obtain at least 15 residues of N-terminal or internal amino acid sequence by use of a spinning cup sequenator, or (3) to homogeneity by SDS-PAGE under non-reducing or reducing conditions using Coomassie blue or silver stain. Isolated antibody includes the antibody in situ within recombinant cells since at least one component of the antibody's natural environment will not be present. Ordinarily, however, an isolated polypeptide or antibody is prepared by at least one purification step.

[0746] The term “monoclonal antibody” as used herein refers to an antibody obtained from a population of substantially homogeneous antibodies, i.e., the individual antibodies comprising the population are identical except for possible naturally occurring mutations and/or post-translation modifications (e.g., isomerizations, amidations) that may be present in minor amounts. In some embodiments, monoclonal antibodies have a C-terminal cleavage at the heavy chain and/or light chain. For example, 1, 2, 3, 4, or 5 amino acid residues are cleaved at the C-terminus of heavy chain and/or light chain. In some embodiments, the C-terminal cleavage removes a C-terminal lysine from the heavy chain. In some embodiments, monoclonal antibodies have an N-terminal cleavage at the heavy chain and/or light chain. For example, 1, 2, 3, 4, or 5 amino acid residues are cleaved at the N-terminus of heavy chain and/or light chain. In some embodiments truncated forms of monoclonal antibodies can be made by recombinant techniques. In some embodiments, monoclonal antibodies are highly specific, being directed against a single antigenic site. In some embodiments, monoclonal antibodies are highly specific, being directed against multiple antigenic sites (such as a bispecific antibody or a multispecific antibody). The modifier “monoclonal” indicates the character of the antibody as being obtained from a substantially homogeneous population of antibodies, and is not to be construed as requiring production of the antibody by any particular method. For example, the monoclonal antibodies to be used in accordance with the present invention may be made by a variety of techniques, including, for example, the hybridoma method, recombinant DNA methods, phage-display technologies, and technologies for producing human or human-like antibodies in animals that have parts or all of the human immunoglobulin loci or genes encoding human immunoglobulin sequences.

[0747] The terms “full-length antibody,” “intact antibody” or “whole antibody” are used interchangeably to refer to an antibody in its substantially intact form, as opposed to an antibody fragment. Specifically, whole antibodies include those with heavy and light chains including an Fc region. The constant domains may be native sequence constant domains (e.g., human native sequence constant domains) or amino acid sequence variants thereof. In some cases, the intact antibody may have one or more effector functions.

[0748] An “antibody fragment” comprises a portion of an intact antibody, such as the antigen binding region and/or the variable region of the intact antibody, and/or the constant region of the intact antibody. Examples of an antibody fragment include the Fc region of the antibody, a portion of the Fc region, or a portion of the antibody comprising the Fc region. Examples of antigen-binding antibody fragments include domain antibodies (dAbs), Fab, Fab′, F(ab′)2 and Fv fragments; diabodies; linear antibodies (see U.S. Pat. No. 5,641,870, Example 2; Zapata et ah, Protein Eng. 8(10): 1057-1062 (19951); single-chain antibody molecules, and multispecific antibodies formed from antibody fragments. Single heavy chain antibodies or single light chain antibodies can be engineered, or in the case of the heavy chain, can be isolated from camelids, shark, libraries or mice engineered to produce single heavy chain molecules.

[0749] Papain digestion of antibodies produced two identical antigen-binding fragments, called “Fab” fragments, and a residual “Fc” fragment, a designation reflecting the ability to crystallize readily. The Fab fragment consists of an entire L chain along with the variable region domain of the H chain (VH), and the first constant domain of one heavy chain (CHI). Each Fab fragment is monovalent with respect to antigen binding, i.e., it has a single antigen-binding site. Pepsin treatment of an antibody yields a single large F(ab′)2 fragment which roughly corresponds to two disulfide linked Fab fragments having different antigen-binding activity and is still capable of cross-linking antigen. Fab′ fragments differ from Fab fragments by having a few additional residues at the carboxy terminus of the CHI domain including one or more cysteines from the antibody hinge region. Fab′-SH is the designation herein for Fab′ in which the cysteine residue(s) of the constant domains bear a free thiol group. F(ab′)2 antibody fragments originally were produced as pairs of Fab′ fragments which have hinge cysteines between them. Other chemical couplings of antibody fragments are also known. The Fc fragment comprises the carboxy-terminal portions of both H chains held together by disulfides. The effector functions of antibodies are determined by sequences and glycan in the Fc region, the region which is also recognized by Fc receptors (FcR) found on certain types of cells.

[0750] “Percent (%) amino acid sequence identity” with respect to a reference polypeptide sequence is defined as the percentage of amino acid residues in a candidate sequence that are identical with the amino acid residues in the reference polypeptide sequence, after aligning the sequences and introducing gaps, if necessary, to achieve the maximum percent sequence identity, and not considering any conservative subshtuyions as part of the sequence identity. Alignment for purposes of determining percent amino acid sequence identity can be achieved in various ways that are within the skill in the art, for instance, using publicly available computer software such as BLAST. BLAST-2, ALIGN or Megalign (DNASTAR) software. Those skilled in the art can determine appropriate parameters for aligning sequences, including any algorithms needed to achieve maximal alignment over the full length of the sequences being compared. For example, the % amino acid sequence identity of a given amino acid sequence A to, with, or against a given amino acid sequence B (which can alternatively be phrased as a given amino acid sequence A that has or comprises a certain % amino acid sequence identity to, with, or against a given amino acid sequence B) is calculated as follows:

100 times the fraction X/Y

where X is the number of amino acid residues scored as identical matches by the sequence in that program's alignment of A and B, and where Y is the total number of amino acid residues in B. It will be appreciated that where the length of amino acid sequence A is not equal to the length of amino acid sequence B, the % amino acid sequence identity of A to B will not equal the % amino acid sequence identity of B to A.

[0751] Antibody “effector functions” refer to those biological activities attributable to the Fc region (a native sequence Fc region or amino acid sequence variant Fc region) of an antibody, and vary with the antibody isotype. Examples of antibody effector functions include: C1q binding and complement dependent cytotoxicity; Fc receptor binding; antibody-dependent cell-mediated cytotoxicity (ADCC); phagocytosis; down regulation of cell surface receptors (e.g., B cell receptors); and B cell activation.

[0752] “Binding affinity” as used herein refers to the strength of the non-covalent interactions between a single binding site of a molecule (e.g., a cytokine) and its binding partner (e.g., a cytokine receptor). In some embodiments, the affinity of a binding protein (e.g., a cytokine) can generally be represented by a dissociation constant (Kd). Affinity can be measured by common methods known in the art, including those described herein.

[0753] An “isolated” nucleic acid molecule encoding the cytokine polypeptides described herein is a nucleic acid molecule that is identified and separated from at least one contaminant nucleic acid molecule with which it is ordinarily associated in the environment in which it was produced. In some embodiments, the isolated nucleic acid is free of association with all components associated with the production environment. The isolated nucleic acid molecules encoding the polypeptides and cytokine polypeptides herein is in a form other than in the form or setting in which it is found in nature. Isolated nucleic acid molecules therefore are distinguished from nucleic acid encoding the polypeptides and cytokine polypeptides herein existing naturally in cells.

[0754] The term “pharmaceutical formulation” refers to a preparation that is in such form as to permit the biological activity of the active ingredient to be effective, and that contains no additional components that are unacceptably toxic to a subject to which the formulation would be administered.

[0755] Such formulations are sterile.

[0756] “Carriers” as used herein include pharmaceutically acceptable carriers, excipients, or stabilizers that are nontoxic to the cell or mammal being exposed thereto at the dosages and concentrations employed. Often the physiologically acceptable carrier is an aqueous pH buffered solution. Examples of physiologically acceptable carriers include buffers such as phosphate, citrate, and other organic acids; antioxidants including ascorbic acid; low molecular weight (less than about 10 residues) polypeptide; proteins, such as serum albumin, gelatin, or immunoglobulins; hydrophilic polymers such as polyvinylpyrrolidone; amino acids such as glycine, glutamine, asparagine, arginine or lysine; monosaccharides, disaccharides, and other carbohydrates including glucose, mannose, or dextrins; chelating agents such as EDTA; sugar alcohols such as mannitol or sorbitol; salt-forming counterions such as sodium; and/or nonionic surfactants such as TWEEN™, polyethylene glycol (PEG), and PLURONICS™.

[0757] As used herein, the term “treatment” refers to clinical intervention designed to alter the natural course of the individual or cell being treated during the course of clinical pathology. Desirable effects of treatment include decreasing the rate of disease progression, ameliorating or palliating the disease state, and remission or improved prognosis. An individual is successfully “treated”, for example, if one or more symptoms associated with a disorder (e.g., a neoplastic disease) are mitigated or eliminated. For example, an individual is successfully “treated” if treatment results in increasing the quality of life of those suffering from a disease, decreasing the dose of other medications required for treating the disease, reducing the frequency of recurrence of the disease, lessening severity of the disease, delaying the development or progression of the disease, and/or prolonging survival of individuals.

[0758] As used herein, “in conjunction with” or “in combination with” refers to administration of one treatment modality in addition to another treatment modality. As such, “in conjunction with” or “in combination with” refers to administration of one treatment modality before, during or after administration of the other treatment modality to the individual.

[0759] As used herein, the term “prevention” includes providing prophylaxis with respect to occurrence or recurrence of a disease in an individual. An individual may be predisposed to, susceptible to a disorder, or at risk of developing a disorder, but has not yet been diagnosed with the disorder. In some embodiments, masked cytokines described herein are used to delay development of a disorder.

[0760] As used herein, an individual “at risk” of developing a disorder may or may not have detectable disease or symptoms of disease, and may or may not have displayed detectable disease or symptoms of disease prior to the treatment methods described herein. “At risk” denotes that an individual has one or more risk factors, which are measurable parameters that correlate with development of the disease, as known in the art. An individual having one or more of these risk factors has a higher probability of developing the disorder than an individual without one or more of these risk factors.

[0761] An “effective amount” refers to at least an amount effective, at dosages and for periods of time necessary, to achieve the desired or indicated effect, including a therapeutic or prophylactic result.

[0762] An effective amount can be provided in one or more administrations. A “therapeutically effective amount” is at least the minimum concentration required to effect a measurable improvement of a particular disorder.

[0763] A therapeutically effective amount herein may vary according to factors such as the disease state, age, sex, and weight of the patient, and the ability of the antibody to elicit a desired response in the individual. A therapeutically effective amount may also be one in which any toxic or detrimental affects of the masked cytokine are outweighed by the therapeutically beneficial effects. A “prophylactically effective amount” refers to an amount effective, at the dosages and for periods of time necessary, to achieve the desired prophylactic result. Typically, but not necessarily, since a prophylactic dose is used in subjects prior to or at the earlier stage of disease, the prophylactically effective amount can be less than the therapeutically effective amount.

[0764] “Chronic” administration refers to administration of the medicament(s) in a continuous as opposed to acute mode, so as to main the initial therapeutic effect (activity) for an extended period of time. “Intermittent” administration is treatment that is not consecutively done without interruption, but rather is cyclic in nature.

[0765] As used herein, an “individual” or a “subject” is a mammal. A “mammal” for purposes of treatment includes humans, domestic and farm animals, and zoo, sports, or pet animals, such as dogs, horses, rabbits, cattle, pigs, hamsters, gerbils, mice, ferrets, rats, cats, etc. In some embodiments, the individual or subject is human.

### 9. Examples

[0766] The invention will be more fully understood by reference to the following examples. They should not, however, be construed as limiting the scope of the invention. It is understood that the examples and embodiments described herein are for illustrative purposes only and that various modifications or changes in light thereof will be suggested to persons skilled in the art and are to be included within the spirit and purview of this application and scope of the appended claims.

[0767] Although some examples describe the engineering, production, and/or testing of “masked” versions of an polypeptide construct, some examples also employ parental “non-masked” versions of the polypeptide construct, such as for comparison, or other constructs that include one or more of the components described herein that are tested as controls for comparison. Accordingly, the description of, for instance, testing done on masked polypeptide constructs does not necessarily mean that non-masked versions of the construct were not also tested.

### Example 1: Engineering of Masked IL-2 Polypeptides

[0768] Masked IL-2 polypeptide constructs are generated in accordance with the teachings herein. In the S subsequent examples, some experiments involve use of the masked IL-2 polypeptide constructs in monomer form, and some experiments involve use of the masked IL-2 constructs in dimer form, such as a dimer formed through disulfide bonds linking two copies of the same masked polypeptide construct (homodimer), or a heterodimer formed by two different polypeptides (see, e.g., Table 5).

[0769] Masked IL-2 polypeptide constructs are generated that include an IL-2 polypeptide or functional fragment thereof, a masking moiety, and a half-life extension moiety, such as an antibody or fragment thereof (e.g., an Fc region, heavy chain, and/or light chain). Some IL-2 polypeptide constructs are also generated that include an IL-2 polypeptide or functional fragment thereof linked to a half-life extension moiety without also including a masking moiety. Some of the constructs also include a linker that comprises a cleavable peptide and links the masking moiety to the IL-2 polypeptide or functional fragment thereof, thereby resulting in an activatable masked IL-2 polypeptide construct. Some of the constructs also include a linker that links the IL-2 polypeptide or functional fragment thereof to the half-life extension domain. Some of the constructs also include a linker that links the IL-2 polypeptide or functional fragment thereof to the masking moiety. The masked IL-2 polypeptide constructs that do not include a cleavable peptide in the linker that links the IL-2 polypeptide or functional fragment thereof to the masking moiety are also referred to as non-activatable masked IL-2 polypeptide constructs or non-activatable IL-2 polypeptide constructs because they do not include a cleavable peptide. The structure and composition of exemplary IL-2 polypeptide constructs are provided in Table 3.

TABLE 3

| | Cytokine or | | | | Half-life | Structure | |
|---|---|---|---|---|---|---|---|
| Construct | functional fragment | | Masking moiety | | extension | (N- to C-terminal | Amino Acid |
| # | thereof (C) | Linker (L1) | (MM) | Linker (L2) | domain (H) | direction) | Sequence |
| AK032 | SEQ ID NO: 62 | — | — | — | SEQ ID NO: 65 | H-C | SEQ ID NO: 67 |
| AK035 | SEQ ID NO: 3 | — | — | — | SEQ ID NO: 65 | H-C | SEQ ID NO: 68 |

[0770] Also generated are masked IL-2 polypeptide constructs that include an IL-2 polypeptide or functional fragment thereof, a first masking moiety, a second masking moiety, and a half-life extension moiety, such as albumin, an antibody or fragment thereof (e.g, an Fc region, heavy chain, and/or light chain), an albumin-binding peptide, an IgG-binding peptide, or a polyamino acid sequence. Some of the constructs also include a linker that links the first masking moiety to the IL-2 polypeptide or functional fragment thereof. Some of the constructs also include a linker that links the second masking moiety to the IL-2 polypeptide or functional fragment thereof. Some of the constructs include a cleavable peptide in the linker linking the first masking moiety to the IL-2 polypeptide or functional fragment thereof and/or the linker linking the second masking moiety to the IL-2 polypeptide or functional fragment thereof, thereby resulting in an activatable masked IL-2 polypeptide construct. Some of the constructs also include a linker linking the second masking moiety to the half-life extension moiety. The masked IL-2 polypeptide constructs that do not include a cleavable peptide in either of the linkers that link the IL-2 polypeptide or functional fragment thereof to the first masking moiety or the second masking moiety are also referred to as non-activatable masked IL-2 polypeptide constructs or non-activatable IL-2 polypeptide constructs 13 because they do not include a cleavable peptide. The structure and composition of exemplary IL-2 polypeptide constructs are provided in Table 4.

| | | | Cytokine or | | | | | | |
|---|---|---|---|---|---|---|---|---|---|
| | Masking | | functional | | Masking | | Half-life | | |
| Construct | moiety | Linker | fragment | Linker | moiety | | extension | Structure | Amino Acid |
| # | (MM1) | (L1) | thereof (C) | (L2) | (MM2) | Linker (L3) | moiety (H) | (N- to C- terminal direction) | Sequence |
| AK041 | SEQ ID | SEQ ID | SEQ ID NO: | SEQ ID | SEQ ID | SEQ ID | SEQ ID NO: | H-LI-MM1-L2-C-L3-MM2 | SEQ ID NO: |
| | NO: 60 | NO: 61 | 62 | NO: 63 | NO: 64 | NO: 17 | 65 | | 66 |

[0771] Also generated are masked IL-2 polypeptide constructs that include an IL-2 polypeptide or functional fragment thereof, a masking moiety, a first half-life extension moiety, and a second half-life extension moiety, an antibody or fragment thereof (e.g., an Fc region, heavy chain, and/or light chain). The masking moiety is linked to the first half-life extension moiety, the IL-2 polypeptide or functional fragment thereof is linked to the second half-life extension moiety, and the first half-life extension moiety and the second half-life extension moiety contain modifications promoting the association of the first and the second half-life extension moiety. In one exemplary embodiment, the masking moiety is linked to the first half-life extension moiety and includes the amino acid sequence of SEQ ID NO: 38, and the IL-2 polypeptide or functional fragment thereof is linked to the second half-life extension moiety and includes the amino acid sequence of SEQ ID NO: 4M, and the first half-life extension moiety and the second half-life extension moiety contain modifications promoting the association of the first and the second half-life extension moiety. In one exemplary embodiment of a non-masked IL-2 polypeptide construct, the embodiment comprises an IL-2 polypeptide or functional fragment thereof linked to a first half-life extension moiety, and comprises a second half-life extension moiety, where the IL-2 polypeptide or functional fragment thereof is linked to the first half-life extension moiety and includes the amino acid sequence of SEQ ID NO: 48, and the second half-life extension moiety includes the amino acid sequence of SEQ ID NO: 79. Some of the constructs also include a linker that links the masking moiety to the first half-life extension moiety, and/or a linker that links the IL-2 polypeptide or functional fragment thereof to the second hair-life extension moiety. The first and second half-life extension moiety of some of the constructs are also linked. In some constructs, the first and second half-life extension moiety of some of the constructs are linked by a linker. Some of the constructs include a cleavable peptide in the linker linking the masking moiety to the first half-life extension moiety and/or the linker linking the IL-2 polypeptide or functional fragment thereof to the second half-life extension moiety, thereby resulting in an activatable masked IL-2 polypeptide construct. The masked IL-2 polypeptide constructs that do not include a cleavable peptide in either the linker that links the IL-2 polypeptide or functional fragment thereof to the second half-life extension moiety or the linker that links the masking moiety to the first half-life extension moiety are also referred to as non-activatable masked IL-2 polypeptide constructs or non-activatable IL-2 polypeptide constructs because they do not include a cleavable peptide. The structure and composition of exemplary IL-2 polypeptide constructs are provided in Table 5.

| | Cytokine or | | | | | | |
|---|---|---|---|---|---|---|---|
| | functional | | | | | Structure | |
| Construct | fragment thereof | | Masking moiety | | Half-life extension | (N - to C-terminal | Amino Acid |
| # | (C) | Linker (L1) | (MM) | Linker (L2) | moiety (H) | direction) | Sequence |
| AK081 | SEQ ID NO; 62 | SEQ ID NO: 18 | — | — | SEQ ID NO: 12 | H-L1-C | SEQ ID NO: 85 |
| | — | — | — | — | SEQ ID NO: 79 | H | SEQ ID NO: 79 |
| AK109 | — | SEQ ID NO: 17 | SEQ ID NO: 4 | — | SEQ ID NO: 80 | H-LI-MM | SEQ ID NO: 86 |
| | SEQ ID NO: 62 | — | — | — | SEQ ID NO: 81 | H-C | SEQ ID NO; 87 |
| AK110 | — | SEQ ID NO: 17 | SEQ ID NO: 4 | — | SEQ ID NO: 82 | H-LI-MM | SEQ ID NO: 88 |
| | SEQ ID NO: 62 | — | — | — | SEQ ID NO: 83 | H-C | SEQ ID NO: 89 |
| AK111 | SEQ ID NO: 62 | SEQ ID NO: 18 | — | — | SEQ ID NO: 12 | H-L1-C | SEQ ID NO: 85 |
| | — | SEQ ID NO: 14 | SEQ ID NO: 4 | — | SEQ ID NO: 9 | H-L1-MM | SEQ ID NO: 38 |
| AK165 | SEQ ID NO: 62 | SEQ ID NO: 18 | — | — | SEQ ID NO: 83 | H-L1-C | SEQ ID NO: 90 |
| | — | — | — | — | SEQ ID NO: 84 | H | SEQ ID NO: 91 |
| AK166 | SEQ ID NO: 62 | SEQ ID NO: 18 | — | — | SEQ ID NO: 83 | H-L1-C | SEQ ID NO: 90 |
| | — | SEQ ID NO: 75 | SEQ ID NO: 4 | — | SEQ IDNO:82 | H-L1-MM | SEQ ID NO: 92 |
| AK167 | SEQ ID NO: 3 | SEQ ID NO: 18 | — | — | SEQ ID NO: 12 | H-L1-C | SEQ ID NO: 45 |
| | — | — | — | — | SEQ ID NO: 79 | H | SEQ ID NO: 79 |
| AK168 | SEQ ID NO: 3 | SEQ ID NO: 18 | — | — | SEQ ID NO: 12 | H-L1-C | SEQ ID NO: 45 |
| | — | SEQ ID NO: 14 | SEQ ID NO: 4 | — | SEQ ID NO; 9 | H-L1-MM | SEQ ID NO: 38 |
| AK189 | SEQ ID NO: 62 | SEQ ID NO: 76 | — | — | SEQ ID NO: 12 | H-L1-C | SEQ ID NO: 93 |
| | — | SEQ ID NO: 14 | SEQ ID NO: 4 | — | SEQ ID NO: 9 | H-L1-MM | SEQ ID NO: 38 |
| AK190 | SEQ ID NO: 62 | SEQ ID NO: 77 | — | — | SEQ ID NO: 12 | H-L1-C | SEQ ID NO: 94 |
| | — | SEQ ID NO: 14 | SEQ ID NO: 4 | — | SEQ ID NO: 9 | H-L1-MM | SEQ ID NO: 38 |
| AK191 | SEQ ID NO: 3 | SEQ ID NO: 20 | — | — | SEQ ID NO: 12 | H-L1-C | SEQ ID NO: 46 |
| | — | SEQ ID NO: 14 | SEQ ID NO: 4 | — | SEQ ID NO: 9 | H-L1-MM | SEQ ID NO: 38 |
| AK192 | SEQ ID NO: 3 | SEQ ID NO: 76 | — | — | SEQ ID NO: 12 | H-L1-C | SEQ ID NO: 95 |
| | — | SEQ ID NO: 14 | SEQ ID NO: 4 | — | SEQ ID NO; 9 | H-L1-MM | SEQ ID NO: 38 |
| AK193 | SEQ ID NO: 3 | SEQ ID NO: 77 | — | — | SEQ ID NO: 12 | H-L1-C | SEQ ID NO: 96 |
| | — | SEQ ID NO: 14 | SEQ ID NO: 4 | — | SEQ ID NO: 9 | H-L1-MM | SEQ ID NO; 38 |
| AK197 | SEQ ID NO: 3 | SEQ ID NO: 21 | — | — | SEQ ID NO: 12 | H-L1-C | SEQ ID NO: 47 |
| | — | SEQ ID NO: 14 | SEQ ID NO: 4 | — | SEQ ID NO: 9 | H-L1-MM | SEQ ID NO; 38 |
| AK203 | SEQ ID NO: 3 | SEQ ID NO: 22 | — | — | SEQ ID NO: 12 | H-L1-C | SEQ ID NO: 48 |
| | — | SEQ ID NO: 14 | SEQ ID NO: 4 | — | SEQ ID NO:9 | H-L1-MM | SEQ ID NO: 38 |
| AK209 | SEQ ID NO: 3 | SEQ ID NO: 78 | — | — | SEQ ID NO: 12 | H-L1-C | SEQ ID NO: 49 |
| | — | SEQ ID NO: 14 | SEQ ID NO: 4 | — | SEQ ID NO; 9 | H-L1-MM | SEQ ID NO: 38 |
| AK210 | SEQ ID NO: 62 | SEQ ID NO: 20 | — | — | SEQ ID NO; 12 | H-L1-C | SEQ ID NO: 97 |
| | — | SEQ ID NO: 14 | SEQ ID NO: 4 | — | SEQ ID NO: 9 | H-L1-MM | SEQ ID NO: 38 |
| AK211 | SEQ ID NO: 3 | SI Q ID NO: 23 | — | — | SEQ ID NO: 12 | H-L1-C | SEQ ID NO: 98 |
| | — | SEQ ID NO: 14 | SEQ ID NO: 4 | — | SEQ ID NO: 9 | H-L1-MM | SEQ ID NO: 38 |
| AK215 | SEQ ID NO: 69 | SEQ ID NO: 18 | — | — | SEQ ID NO: 12 | H-L1-C | SEQ ID NO: 99 |
| | — | SEQ ID NO: 14 | SEQ ID NO: 4 | — | SEQ ID NO: 9 | H-L1-MM | SEQ ID NO: 38 |
| AK216 | SEQ ID NO: 70 | SEQ ID NO: 18 | — | — | SEQ ID NO: 12 | H-L1-C | SEQ ID NO: 100 |
| | — | SEQ ID NO: 14 | SEQ ID NO: 4 | — | SEQ ID NO: 9 | H-L1-MM | SEQ ID NO: 38 |
| AK218 | SEQ ID NO: 71 | SEQ ID NO: 18 | — | — | SEQ ID NO: 12 | H-L1-C | SEQ ID NO: 101 |
| | — | SEQ ID NO: 14 | SEQ ID NO: 4 | — | SEQ ID NO: 9 | H-L1-MM | SEQ ID NO: 38 |
| AK219 | SEQ ID NO: 72 | SEQ ID NO: 18 | - | — | SEQ ID NO: 12 | H-L1-C | SEQ ID NO: 102 |
| | — | SEQ ID NO: 14 | SEQ ID NO: 4 | — | SEQ ID NO: 9 | H-L1-MM | SEQ ID NO: 38 |
| AK220 | SEQ ID NO: 873 | SEQ ID NO: 18 | — | — | SEQ ID NO: 12 | H-L1-C | SEQ ID NO: 103 |
| | — | SEQ ID NO: 14 | SEQ ID NO: 4 | — | SEQ ID NO: 9 | H-L1-MM | SEQ ID NO: 38 |
| AK223 | SEQ ID NO: 74 | SEQ ID NO: 18 | — | — | SEQ ID NO: 12 | H-L1-C | SEQ ID NO: 104 |
| | — | SEQ ID NO: 14 | SEQ ID NO: 4 | — | SEQ ID NO: 9 | H-L1-MM | SEQ ID NO: 38 |
| AK235 | SEQ ID NO: 3 | SEQ ID NO: 78 | — | — | SEQ ID NO: 12 | H-L1-C | SEQ ID NO: 49 |
| | — | — | — | — | SEQ ID NO: 79 | H | SEQ ID NO: 79 |
| AK253 | SEQ ID NO: 3 | SEQ ID NO: 23 | — | — | SEQ ID NO: 12 | H-L1-C | SEQ ID NO: 98 |
| | — | — | — | — | SEQ ID NO: 79 | H | SEQ ID NO: 79 |
| AK304 | SEQ ID NO: 69 | SEQ ID NO: 78 | — | — | SEQ ID NO: 12 | H-L1-C | SEQ ID NO: 105 |
| | — | — | — | — | SEQ ID NO: 9 | H | SEQ ID NO: 70 |
| AK305 | SEQ ID NO: 69 | SEQ ID NO: 78 | — | — | SEQ ID NO: 12 | H-L1-C | SEQ ID NO: 105 |
| | — | SEQ ID NO: 14 | SEQ ID NO: 4 | — | SEQ ID NO: 9 | H-L1-MM | SEQ ID NO: 38 |
| AK306 | SEQ ID NO: 70 | SEQ ID NO: 78 | — | — | SEQ ID NO: 12 | H-L1-C | SEQ ID NO: 106 |
| | — | — | — | — | SEQ ID NO: 79 | H | SEQ ID NO: 79 |
| AK307 | SEQ ID NO: 70 | SEQ ID NO: 78 | — | — | SEQ ID NO: 12 | H-L1-C | SEQ ID NO: 106 |
| | — | SEQ ID NO: 14 | SEQ ID NO:4 | — | SEQ ID NO: 9 | H-L1-MM | SEQ ID NO: 38 |
| AK308 | SEQ ID NO: 71 | SEQ ID NO: 78 | — | — | SEQ ID NO: 12 | H-L1-C | SEQ ID NO: 107 |
| | — | — | — | — | SEQ ID NO: 79 | H | SEQ ID NO: 79 |
| AK309 | SEQ ID NO: 71 | SEQ ID NO: 78 | — | — | SEQ ID NO: 12 | H-L1-C | SEQ ID NO: 107 |
| | — | SEQ ID NO: 14 | SEQ ID NO: 4 | — | SEQ ID NO: 9 | H-L1-MM | SEQ ID NO: 38 |
| AK 310 | SEQ ID NO: 72 | SEQ ID NO: 78 | — | — | SEQ ID NO: 12 | H-L1-C | SEQ ID NO: 108 |
| | — | — | — | — | SEQ ID NO: 79 | H | SEQ ID NO: 79 |
| AK 311 | SEQ ID NO: 72 | SEQ ID NO: 78 | — | — | SEQ ID NO: 12 | H-L1-C | SEQ ID NO: 108 |
| | — | SEQ ID NO: 14 | SEQ ID NO:4 | — | SEQ ID NO: 9 | H-L1-MM | SEQ ID NO: 38 |
| AK 312 | SEQ ID NO: 73 | SEQ ID NO: 78 | — | — | — | H-L1-C | SEQ ID NO: 109 |
| | — | — | — | — | — | H | SEQ ID NO: 79 |
| AK 313 | SEQ ID NO: 73 | SEQ ID NO: 78 | — | — | SEQ ID NO: 13 | H-L1-C | SEQ ID NO: 109 |
| | — | SEQ ID NO: 14 | SEQ ID NO: 4 | — | SEQ ID NO: 9 | H-L1-MM | SEQ ID NO: 38 |
| AK 314 | SEQ ID NO: 74 | SEQ ID NO: 78 | — | — | SEQ ID NG: 12 | H-L1-C | SEQ ID NO: 110 |
| | — | — | — | — | SEQ ID NO: 9 | H | SEQ ID NO: 79 |
| AK 315 | SEQ ID NO: 74 | SEQ ID NO: 78 | — | — | SEQ ID NO: 12 | H-L1-C | SEQ ID NO: 110 |
| | — | SEQ ID NO: 14 | SEQ ID NO: 4 | — | SEQ ID NO: 9 | H-L1-MM | SEQ ID NO: 38 |
| AK 316 | SEQ ID NO: 62 | SEQ ID NO: 78 | — | — | SEQ ID NO: 12 | H-L1-C | SEQ ID NO: 112 |
| | — | SEQ ID NO: 14 | SEQ ID NO: 4 | — | SEQ ID NO: 9 | H-L1-MM | SEQ ID NO: 38 |

### Example 2: In Vitro Characterization of Masked IL-2 Polypeptides

[0772] The masked IL-2 polypeptide constructs generated in Example 1 are characterized using several cellular and functional assays in vitro.

### Production

[0773] Plasmids encoding the constructs (e.g., masked IL-2 polypeptide constructs) were transfected into either Expi293 cells (Life Technologies A14527) or HEK293-6E cells (National Research Council; NRC). Transfections were performed using 1 mg of total DNA using PEIpro (Polyplus Transfection, 115-1(10) in a 1:1 ratio with the total DNA. The DNA and PEI were each added to 50 mL of OptiMem (Life Technologies 31985088) medium and sterile filtered. The DNA and PEI were combined for 10 minutes and added to the Expi293 cells with a cell density of 1.8-2.8×10V cells/mL or 0.85-1.20×I0V cells/m, for expi293 cells or HEK293 cells, respectively, and a viability of at least 95%. The HEK293-6E transfection was performed with a cell density of and a viability of at least 95%, following the same protocol used for the Expi293 transfections. After 5-7 days, the cells were pelleted by centrifugation at 3000×g and the supernatant was filtered through a 0.2 μm membrane. Protein A resin (CaptivA, Repligen CA-PRI-0005) was added to the filtered supernatant and incubated for at least 2 hours at 4° C. with shaking. The resin was packed into a column, washed with 15 column volumes of 20 mM citrate, pH 6.5, and then washed with 15 column volumes of 20 mM citrate, 500 mM sodium chloride, pH 6.5. The bound protein was eluted from the column with 20 mM citrate, 100 mM NaCl, pH 2.9.

[0774] The titer (mg/L) of exemplary constructs produced, including parental (e.g., non-masked) and masked constructs, is provided in Table 6, below.

TABLE 6

| Construct | Titer |
|---|---|
| ID | (mg/L) |
| AK032 | 5.8 |
| AK035 | 16.7 |
| AK081 | 23.5 |
| AK111 | 12.7 |
| AK165 | 13.5 |
| AK166 | 17.1 |
| AK167 | 56.4 |
| AK168 | 36.1 |
| AK203 | 83.2 |
| AK209 | 27.3 |
| AK211 | 43.8 |
| AK235 | 35.9 |
| AK253 | 41.4 |
| AK304 | 19.9 |
| AK305 | 53.2 |
| AK306 | 29.3 |
| AK307 | 62.9 |
| AK314 | 60 |
| AK315 | 59.8 |
| AK316 | 69.2 |
| AK308 | 74.5 |
| AK309 | 90.8 |
| AK310 | 44 |
| AK311 | 64.9 |
| AK312 | 154 |
| AK313 | 81.2 |

### SDS-PAGE Analysis

[0775] For SDS-PAGE analysis, protein samples were made with 4× Laemmli sample buffer (BioRad Catalog Number 1610747). For the reduced samples, 0.1 M Bond Breaker TCEP Solution (Thermo Scientific 77720) was added and the samples were heated for 5 minutes at 65° C. The proteins were loaded into a 12-well NuPage 4-12% Bis-Tris Protein Gel (Invitrogen NP0322BOX), with 4 μg of protein loaded per well. The gel was stained using SimplyBlue SafeStain (Invitrogen LC6065).

[0776] As depicted in FIG. 4, SDS-PAGE analysis was performed on the flow-through (FT) samples (i.e., proteins that did not bind to the Protein A column) and the eluted (E) samples (i.e., proteins that bound to the Protein A column and were eluted from it) following production and purification of exemplary constructs (AK304, AK305, AK307, AK308, AK309, AK310, AK311, AK312, AK313, AK314, and AK315). This exemplary data demonstrates that constructs as described herein can be successfully produced and purified.

### Reporter Bioassays

[0777] Reporter bioassays are performed on masked IL-2 polypeptide constructs, along with non-masked parental constructs or other controls, to monitor activation of a downstream pathway, such as the JAK-STAT pathway.

[0778] In some studies, HEK-Blue IL-2 reporter cells (Invivogen) were used to test activation of the JAK-STAT pathway in accordance with the following method. HEK-Blue IL-2 cells passage 6 (p6) (97% live) were washed 2× with assay medium (DMEM+10% heat-inactivated FBS), plated in 3 plated at 5e4 cells/well in 150 uL of assay medium, and rested in assay medium for about 2 hours to allow adherence to plate. Each construct tested was diluted to 300 pM in assay medium, then diluted 1:2 down the plate, 50 uL, of each dilution was added, for a final starting concentration of 75 pM. HEK-Blue IL-2 cell supernatant was harvested after 24 hours, an incubated with Quantiblue (180 uL-20 uL supernatant), plus 3 wells/plate of assay medium, at 37 deg C. for 1 hour. The absorbance was read using a Biotek Neo2 at 625 nm.

[0779] In some studies, CTLL2 cells were used to test activation of the JAK-STAT pathway in accordance with the following method. CT112 cells were plated at 40,000 cell per well in RPMI with 10% FBS. Dilutions of the constructs of interest were added and incubated at 37 degrees. After 6 hours, the Bio-Glo reagent was added and luminescence measured with a BioTek Synergy Neo2 plate reader.

### Receptor Binding

[0780] The binding of the masked IL-2 polypeptide constructs generated in Example 1 is assessed. ELISA plates are coated with a receptor subunit, such as IL-2Rα (also referred to as CD25), IL-2Rβ (also referred to as CD122), or IL-2Rγ (also referred to as CD132), or combinations thereof. Dilutions of masked IL-2 polypeptide constructs are allowed to bind to the receptor subunit(s) and are detected using an anti-huFc-HRP detection antibody. The binding of the masked IL-2 polypeptide constructs is determined in conditions with and without protease cleavage.

### On-Cell Receptor Binding

[0781] The on-cell receptor binding of the masked IL-2 polypeptide constructs generated in Example 1 is assessed. Dilutions of masked IL-2 polypeptide constructs are allowed to bind to peripheral blood lymphocytes or tissue culture cells, such as CTLL2 cells and are detected by fluorescence activated cell sorting (FACS) using an anti-huFc-FITC or anti-albumin-FITC detection antibody. The binding of the masked IL-2 polypeptide constructs is determined in conditions with and without protease cleavage.

### Receptor Binding Affinity

[0782] The binding affinity of the masked IL-2 polypeptide constructs generated in Example 1 is assessed. The binding affinity of the masked IL-2 polypeptide constructs is determined in conditions with and without protease cleavage.

[0783] For SPR studies testing binding of masked and non-masked IL-2 polypeptide constructs, Reichert Carboxymethyl Dextran Hydrogel Surface Sensor Chips were coated and immobilized with the construct of interest (e.g., a masked IL-2 polypeptide construct or non-masked IL-2 polypeptide construct) at 30 ug/ml in 10 mM Sodium Acetate, pH 5.0 via amine coupling with EDC and NHS. Dilutions of CD25-Fc or Fc-CD122 in PBST (CD25: 16 nM, 8 nM, 4 nM, 2 nM, 1 nM and CD122: 500 nM, 250 nM, 12.5 nM, 62.5 nM, 31.25 nM) were prepared. Using a Reichert 4 Channel SPR, dilutions of CD25 or CD122 were flowed over the clips with the immobilized construct to determine the on rate at 25 degrees C. At equilibrium (approximately 3 minutes), the flow buffer was changed to PBST, to determine the off rates over 6 minutes. Between each run the chip was regenerated with 10 mM glycine, pH 2.0.

[0784] FIGS. 5A-5D depicts the efficacy of mutations on IL-2 which prevent binding to its alpha-receptor, using SPR analysis that tested the binding of an exemplary masked IL-2 polypeptide construct (AK168) to CD25− Fc. FIG. 5A depicts the interaction between AK168 and CD25-Fc, FIG. 5B depicts the interaction between AK168 activated with MMP and CD25-Fc, and FIG. 5C depicts the interaction between a recombinant human IL-2 (rhIL-2) control and CD25-Fc. FIG. 5D provides a table summarizing the data obtained for the association constant (ka), dissociation constant (kd), equilibrium dissociation constant (KD), as well as the Chi² value and U-value for each interaction. These results demonstrate that this exemplary masked IL-2 polypeptide construct (AK168) did not demonstrate detectable binding to CD25-Fc, while the wild-type rhIL-2 control did demonstrate detectable binding.

[0785] FIGS. 6A-6D depicts the masking of IL-2 towards its beta-receptor as well as restoration of binding post activation with protease, using SPR analysis that tested the binding of an exemplary masked IL-2 polypeptide construct (AK111) to CD122-Fc. FIG. 6A depicts the interaction between AK111 and CD122-Fe, FIG. 6B depicts the interaction between AK111 activated with MMP and CD122-Fc, and FIG. 6C depicts the interaction between a recombinant human IL-2 (rhIL-2) control and CD122-Fc. FIG. 6D provides a table summarizing the data obtained for the association constant (ka), dissociation constant (kd), equilibrium dissociation constant (KD), as well as the Chi value and U-value for each interaction. These results demonstrate that this exemplary masked IL-2 polypeptide construct (AK111) did not demonstrate detectable binding to CD122-Fc unless it has been activated with protease, while the rhIL-2 control did demonstrate detectable binding. Additional exemplary SPR data is provided below in Table 7 for various constructs tested, including masked and non-masked constructs. For some structures, when applicable, the KD was determined for the construct with or without having been previously cleaved by a protease.

TABLE 7

| | KD for CD25 | KD for CD122 | KD for CD122 |
|---|---|---|---|
| Construct | (without protease cleavage) | (without protease cleavage) | (after protease cleavage) |
| rhlL2 | 0.878 nM | 124 nM | N/A |
| AK032 | 1.76 nM | 260 nM | N/A |
| AK035 | No binding detected | 110 nM | N/A |
| AK081 | 0.875 nM | 347 nM | N/A |
| AK109 | 167 nM | No binding detected | 118 nM |
| AK110 | 0.911 nM | No binding detected | 195 nM |
| AK111 | 0.4 nM | No binding detected | 235 nM |
| AK168 | No binding detected | Not determined | 175 nM |
| AK215 | No binding detected | | |
| AK216 | No binding detected | | |
| AK218 | Weak binding | | |
| AK219 | Weak binding | | |
| AK220 | Weak or no binding detected | | |

| | |
|---|---|
| AK223 | No binding detected |

### Cleavage

[0786] The cleavage rate of the masked IL-2 polypeptide constructs is assessed by conducting receptor-binding assays, as described above, after incubation of the masked IL-2 peptide constructs in the presence or absence of a protease, and with the protease, if any, inactivated at various time points, such as by the addition of EDTA. The cleavage rate is also assessed using reducing and non-reducing polyacrylamide gel electrophoresis (PAGE) and by mass spectrometry whole mass and peptide map analyses. The cleavage rate is also assessed using an ex vivo assay in which the masked IL-2 polypeptide constructs are exposed to human, mouse, or cynomolgus monkey peripheral blood lymphocytes, or normal human tissue or human tumor tissue.

[0787] For some protease activation studies, MMP10 was diluted to 50 ng/uL in MMP cleavage buffer and activated with 1 mM APMA for 2 h at 37° C. 5 μL of protease (250 ng total) of the activated protease was incubated with 1 uM of masked cytokine constructs and incubated at 37 degrees for 2 hours. Cleavage was assessed by SDS-PAGE using AnykD™ Criterion™ TGX Stain-Free™ Protein Gels. A similar approach is taken to test cleavage by other proteases.

[0788] FIG. 7A depicts an exemplary structure of a masked IL-2 polypeptide prior to (left) and after (right) cleavage by a protease, such as a protease associated with the tumor environment. FIG. 7B depicts SDS-PAGE analysis of an exemplary masked IL-2 polypeptide construct that was incubated in the absence (left lane) or presence (right lane) of the MMP10 protease.

### Proliferation

[0789] Proliferation of IL-2 responsive tissue culture cell lines, such as CTLL2, YT, TF1B, LGL, HH, and CT6, following treatment with the masked IL-2 polypeptide constructs generated in Example 1 is assessed. For experiments involving the masked IL-2 polypeptide constructs, cells are plated in 96 well tissue culture plates in media lacking IL-2 for 2-4 hours and then treated with the masked IL-2 polypeptide constructs at various concentrations. After incubation at 37 degrees for 24-48 hours, the cell number is determined by the addition of MTS, alamar blue, luciferase, or a similar metabolic detection reagent, and the colorimetric, fluorescent or luciferase readout detected by a plate spectrophotometer reader.

[0790] The proliferation of immune cells following treatment with the masked IL-2 polypeptide constructs generated in Example 1 is also assessed. Human, mouse, or cynomolgus peripheral blood mononuclear cells (PBMCs) are treated with the constructs at various concentrations, and the proliferation of cell types, such as Natural Killer (NK) cells, CD8+ T cells, CD4+ T cells, and/or Treg cells, is determined by staining for the particular cell type and analysis via fluorescence activated cell sorting (FACS). In some experiments, some PBMCs are treated with controls for comparison. In some experiments, some PBMCs are treated with aldesleukin as a control for the masked IL-2 polypeptide treatment. In some experiments, the NK cells are stained as CD45+CD3− CD56+, the CD8+ T cells are stained as CD45+CD3+CD8+, the CD4+ T cells are stained as CD45+CD3+CD4+CD25-, and the Treg cells are stained as CD45+CD3+CD4+CD25+ FOXP3+. In some experiments, the PBMCs are treated for a period of five days. In some experiments, the PBMCs are also stained with K67, a marker of cell proliferation. In some experiments, the PBMCs are labeled with CFSE (Sigma-Aldrich) prior to treatment and proliferation is measured by determining the extent of CFSE dilution. In some experiments, each construct, as well as aldesleukin and/or other controls, is administered at one or more concentrations, such as one or more concentrations ranging from 0.0001 nM to 500 nM.

### STAT5 Activation

[0791] The activation of Signal Transducer and Activator of Transcription 5 (STAT5) following treatment with the masked IL-2 polypeptide constructs generated in Example 1 is also assessed. PBMCs are treated with the constructs for a specified period of time and are then immediately fixed to preserve the phosphorylation status of proteins, such as STAT5. In some experiments, some PBMCs are treated with controls for comparison. In some experiments, some PBMCs are treated with aldesleukin as a control for the masked IL-2 polypeptide treatment. In some experiments, the masked IL-2 polypeptide constructs are tested in conditions with and without protease cleavage (e.g., activation). In some experiments, the PBMCs are treated for 10 minutes, 15 minutes, 20 minutes, or 25 minutes. In some experiments, each construct, as well as aldesleukin and/or other controls, is administered at one or more concentrations, such as one or more concentrations ranging from 0.0001 nM to 500 nM. In some experiments, the fixed and permeabilized PBMCs are then stained with an antibody specific for phosphorylated STAT5 (phospho-STAT5) and are analyzed by flow cytometry. In some experiments, total and phosphorylated levels of STAT5 are measured. The phospho-STAT5 status of certain cell types, such as NK cells, CD8+ T cells, CD4+ T cells, and/or Treg cells, is determined by staining for the particular cell type. In some experiments, the NK cells are stained as CD45+CD3− CD56+, the CD8+ T cells are stained as CD454 CD3+C1D8+, the CD4+ T cells are stained as CD45+CD3+CD4+CD25−, and the Treg cells are stained as CD45+CD3+CD4+CD25+ FOXP3+.

[0792] The activation of STAT5 in the mouse cell lines, such as CTLL-2 cells, following treatment with the masked IL-2 polypeptide constructs generated in Example 1 is also assessed. In some experiments, some CTLL-2 cells are treated with controls for comparison. In some experiments, some CTLL-2 cells are treated with aldesleukin as a control for the masked IL-2 polypeptide treatment. In some experiments, the masked IL-2 polypeptide constructs are tested in conditions with and without protease cleavage (e.g., activation). In some experiments, the CTLL-2 cells are treated for 10 minutes, 15 minutes, 20 minutes, or 25 minutes, and are then fixed to preserve the phosphorylation status of proteins, such as STAT5. In some experiments, each construct, as well as aldesleukin and/or other controls, is administered at one or more concentrations. In some experiments, total and phosphorylated levels of STAT5 are measured.

[0793] In some studies, the levels of intracellular STAT5 activation (pSTAT5 signal) induced by IL-2 was determined by the following method. Frozen human PBMCs were thawed in water bath and added to 39 mL pre-warmed media (RPMI1640 medium plus 10% FBS, 1% PIS, 1% NEA), spun and reconstitute in media at 10E6 cells/mL. Cells were plated at 5E5 per well cells in a 96 well plate. IL-2 (e.g., rhIL-2 or an exemplary IL-2-containing polypeptide construct) diluted in medium was added to each well, and incubated at 37° C. for 20 min. Cells were then fix with 200 ul/well Fixation buffer (eBiosciences) at 4° C. overnight. After centrifugation, the fixed cells were resuspended in 200 ul cold BD Phosflow buffer and incubated at 4° C. for 30 min. After washing the cells twice, they were treated with Biolegend Human TruStain FcX (2.5 uL in 50 uL total per sample in Staining buffer) for 5 min on ice. Staining antibodies were added; 5 ul pSTAT5-APC (pY694, BD), 10 ul CD56-BV421 (5.1H11, Biolegend), 10 ul CD4-PerCP/Cy5.5 (A161A1. Biolegend), and 10 ul CD3-FITC (UCHT1, Biolegend) and incubated for 30 min. on ice, protected from light. Cells were washed 2 times and resuspended, and analyzed by flow cytometry.

[0794] FIGS. 8A-8D depict the results from STAT5 activation studies, as described above, using the exemplary constructs AK032, AK035, AK041, or rhIL-2 as a control. The levels of STAT5 activation (%) are shown for NK cells. CD8+ T cells, effector T cells (Teff), and regulatory T cells (Treg). The AK032 and AK035 constructs include an IL-2 polypeptide linked to an Fc domain, and the AK041 construct includes an IL-2 polypeptide linked to a CD25 domain and a CD122 domain. As shown, engineered IL-2 polypeptide constructs can, in some embodiments, reduce activation of Treg cells while retaining or enhancing activation of CD8+ T cells and NK cells.

[0795] FIGS. 9A-9C depict the results from STAT5 activation studies, as described above, using the exemplary constructs AK081 and AK032. The AK081 construct with and without prior exposure to MMP10 was tested. An isotype control as well as a no IL-2 negative control was also tested. The levels of STAT5 activation (%) are shown for NK cells, CD8+ T cells, and CD4+ T cells. The AK032 and AK081 constructs include an IL-2 polypeptide linked to an Fc domain, and the AK081 construct includes a cleavable peptide in the linker connecting the IL-2 polypeptide to the Fc domain. As shown, the non-masked monomeric AK08I IL-2 polypeptide construct stimulates STAT5 activation of PBMCs with or without protease activation similarly to the non-masked dimeric AK032 IL-2 polypeptide construct.

[0796] FIGS. 10A-10D depict the results from STAT5 activation studies, as described above, using the exemplary constructs AK081 and AK111, as well as controls that included an rhIL-2 and anti-RSV antibody. A no-treatment control was also tested. The AK111 construct is an exemplary masked IL-2 polypeptide construct that includes a wildtype form of an IL-2 polypeptide (except for a C125A mutation). As shown in FIGS. 10A-10D, the masked IL-2 polypeptide construct AK111 demonstrated reduced STAT5 activation as compared to the non-masked IL-2 polypeptide construet AK081. FIG. 10D provides EC50 (pM) and fold-change data for the AK081, AK1111 constructs, as well as the rhIL-2 control.

[0797] FIGS. 11A-11D depict the results from STAT5 activation studies, as described above, using the exemplary constructs AK167 and AK168, as well as controls that included an rhIL-2 and anti-RSV antibody. A no-treatment control was also tested. The AK168 construct is an exemplary masked IL-2 polypeptide construct that includes a mutant form of an IL-2 polypeptide that eliminates or reduces CD25 binding. The AK167 construct is a parental, non-masked form of the AK168 construct that includes the same mutant IL-2 polypeptide. As shown in FIGS. 11A-11C, the non-masked AK167 construct demonstrated reduced STAT5 activation as compared to the rhIL-2 control, and the masked IL-2 polypeptide construct AK168 did not induce detectable STAT5 activation. FIG. 11D provides EC50 (pM) and fold-change data for the AK167. AK168 constructs, as well as the rhIL-2 control. The EC50 of the AK168 construct was non-detectable (n.d.).

[0798] FIGS. 12A-12D depict the results from STAT5 activation studies, as described above, using the exemplary constructs AK165 and AK166, as well as an isotype control and an IL-2-Fc control, that were (+MMP10) or were not previously exposed to the MMP10 protease. The AK166 construct is an exemplary masked IL-2 polypeptide construct that includes a wildtype form of an IL-2 polypeptide (except for a C125A mutation). The AK165 construct is a parental, non-masked form of the AK166 construct that includes the same IL-2 polypeptide. The key as shown in FIG. 12A also applies to FIG. 12B, and the key as shown in FIG. 12C also applies to FIG. 12D. As shown in FIGS. 12A-12D STAT5 activation was greatly diminished for the masked AK166 construct (without protease cleavage), but was restored to levels resembling the 1L2-Fc control following exposure to the activating protease MMP10.

[0799] FIGS. 13A-13C depict the results from STAT5 activation studies, as described above, using the exemplary constructs AK109 and AK110, as well as an isotype control and an IL-2-Fc control, that were (+MMP10) or were not previously exposed to the MMP10 protease. The AK109 and AK110 construct are exemplary masked IL-2 polypeptide constructs that include half-life extension moieties having different heterodimerization mutations. The key as shown in FIG. 13B also applies to FIG. 13A. As shown in FIGS. 13A-13C. STAT5 activation was greatly diminished for the masked AK09 and AK110 construct (without protease cleavage), but was greatly increased to levels approaching the 1L2-Fc control following exposure to the activating protease MMP10.

[0800] FIGS. 14A-14D depict the results from STAT5 activation studies, as described above, using the constructs AK211, AK235, AK253, AK306, AK310, AK314, and AK316, as well as an an rhIL-2 control. This includes constructs that are parental, non-masked constructs (AK235, AK253, AK306, AK310, AK314) that include various mutations that modulate CD25 binding. FIG. 14D provides EC50 data for each of the tested constructs as well as the rhIL-2 control.

[0801] FIGS. 15A-15D depict the results from STAT5 activation studies, as described above, using the constructs AK081, AK167, AK216, AK218, AK219, AK220, and AK223 that have been activated by protease, as well as an an rhIL-2 control. A no-treatment control was also tested. This includes masked IL-2 polypeptide constructs (AK216, AK218, AK219, AK220, and AK223) that include various mutations that modulate CD25 binding. The constructs were previously exposed to an activating protease prior to testing their ability to activate STAT5. FIG. 15D provides EC50 data for each of the tested constructs as well as the rtIL-2 control.

[0802] FIGS. 16A-16C depict the results from STAT5 activation studies, as described above, using the constructs AK081, AK189, AK190, and AK210, as well as an an anti-RSV control. This includes masked IL-2 polypeptide constructs (AK189, AK190, AK2101 that include an IL-2 polypeptide having a C125A mutation and include the same cleavable peptide sequence (RAAAVKSP; SEQ ID NO: 27) but having different linker sequences due to differences in the amino acid residues on the N-terminus of the protease cleavage sequence. The key as shown in FIG. 16A also applies to FIGS. 16B and 16C.

[0803] FIGS. 17A-17C depict the results from STAT5 activation studies, as described above, using the constructs AK167, AK191, AK192, and AK193, as well as an an anti-RSV control. This includes masked IL-2 polypeptide constructs (AK189, AK190, AK210) that include an IL-2 polypeptide having R38A, F42A, Y45A, E62A, and C125A mutations and include the same cleavable peptide sequence (RAAAVKSP; SEQ ID NO: 27) but having different linker sequences due to differences in the amino acid residues on the N-terminus of the protease cleavage sequence. The key as shown in FIG. 17A also applies to FIGS. 17B and 17C.

### Example 3 In Vivo Characterization of Masked IL-2

### Pharmacokinetics

[0804] The pharmacokinetics of the masked IL-2 polypeptide constructs generated in Example 1 is assessed in vivo using mouse models.

[0805] Mice are treated intravenously, intraperitoneally or subcutaneously with the constructs and the concentration of the construct in the plasma is measured over time. In some experiments, some mice are treated with controls for comparison. In some experiments, some mice are treated with aldesleukin as a control for masked IL-2 polypeptide treatment. In some experiments, the mice that are treated have tumors. In some experiments, the mice that are treated are tumor-free. In some experiments, mice are treated with the constructs and blood is drawn at various times over the course of treatment, which may include drawing blood prior to the initiation of treatment and processing it to obtain plasma. In some experiments, blood is drawn at various time points over the course of two weeks, three weeks, or four weeks or more of treatment. In some experiments, the mean plasma concentration of the administered constructs, as well as aldesleukin and/or other controls, is measured. Masked IL-2 polypeptide constructs are detected in the plasma samples after dilution into PBS Tween with IL-2- and human Fc-specific ELISAs and are quantified using a standard curve generated for each construct. The percentage of full length and cleaved constructs is determined by western blot with anti-huFc-HRP and anti-huIL-2-HRP and by whole mass and peptide mass spectrometry. The pharmacokinetics of the masked IL-2 polypeptide constructs in tumors is also assessed in vivo using mouse models. Mice having tumors are treated intravenously or subcutaneously with the constructs and the concentration of the construct in tumors of the mice is assessed. In some experiments, some mice are treated with controls for comparison. In some experiments, some mice are treated with aldesleukin as a control for masked IL-2 polypeptide treatment. Tumors are analyzed for the presence of the constructs as well as the presence of particular proteases. In some experiments, the tumors are analyzed for the presence and percentage of full length and cleaved constructs.

[0806] Some pharmacokinetic studies were carried out according to the following method. C57BL/6 female mice were purchased from Charles River Laboratories and were 8-10 weeks old at the start of study. MC38 tumor cells (5×10⁵ cells per mouse) were injected subcutaneously into the right flank of each mouse. Upon reaching ˜100 mm³ sized tumors (day 0), the mice received a single 2 mg/kg intravenous dose of the construct of interest (e.g., a non-masked parental IL-2 polypeptide construct, a masked IL-2 polypeptide construct, or a non-cleavable masked IL-2 polypeptide construct) in PBS. Constructs tested include, for instance. AK032, AK081, AK111, AK167, AK168 AK191, AK197, AK203, AK209, and AK211. Plasma were collected at 5 min, days 1, 2 and 5 after dosing. Drug levels were determined using ELISAs utilizing anti-human IgG (clone M1310G05, Biolegend) as the capture antibody and various detection antibodies. HRP or biotin conjugated detection antibodies against human IgG (ab97225, Abcam) or CD122 (clone 9A2, Ancell) and IL-2 (Poly5176, Biolegend) were utilized to detect total and non-cleaved drug levels, respectively.

[0807] FIGS. 18A-18D describe results from pharmacokinetic studies carried out, as described above, in tumor-bearing mice using the constructs AK032, AK081, AK111, AK167, and AK168, as well as an anti-RSV control. FIG. 18A provides a simplistic depiction of the structure of each of the constructs tested. As indicated. AK111 and AK168 are exemplary masked IL-2 polypeptide constructs. The AK167 and AK168 constructs include mutations (R38A, F42A, Y45A, and E62A) that eliminate or reduce binding to CD25. FIG. 18A shows Fc levels in plasma (μg/mL) by detecting human IgG, FIG. 18C shows Fc-CD122 levels in plasma (μg/mL) by detecting human CD122, and FIG. 18D shows Fc-1L2 levels in plasma (μg/mL) by detecting human IL-2.

[0808] FIGS. 19A-19D describe results from pharmacokinetic studies carried out, as described above, in tumor-bearing mice using the constructs AK167, AK191 AK197, AK203, AK209, and AK211, as well as an anti-RSV control. FIG. 19A provides a simplistic depiction of the structure of each of the constructs tested. As indicated, AK168, AK191, AK197, AK203, and AK209 are exemplary masked IL-2 polypeptide constructs that each include a different cleavable peptide sequence in the linker connecting the IL-2 polypeptide to the half-life extension moiety. FIG. 19B shows Fc levels in plasma (μg/mL) by detecting human IgG, FIG. 19C shows Fc-IL2 levels in plasma (μg/mL) by detecting human IL-2, and FIG. 19D shows Fc-CD122 levels in plasma (μg/mL) by detecting human CD122. As shown in FIGS. 19B, 19C and 19D, the Fe levels, Fc-1L2 levels, and Fc-CD122 levels in the plasma are similar among the masked IL-2 polypeptide constructs tested.

### Bioactivity in Mice

[0809] The in vivo bioactivity of the masked IL-2 polypeptide constructs generated in Example 1 is assessed in vivo using mouse models, such as C57BL/6 mice. Mice are treated with the constructs and in vivo bioactivity is assessed. In some experiments, some mice are treated with controls for comparison. In some experiments, some mice are treated with aldesleukin as a control for masked IL-2 polypeptide treatment. In some experiments, the mice that are treated have tumors. In some experiments, the mice that are treated are tumor-free. In some experiments, the dose-dependent expansion of immune cells is assessed in the mice. In some experiments, the mice are treated with various doses of a construct, aldesleukin, or other control. In some experiments, the mice are treated over the course of two weeks. Blood is collected from the mice at various time points and is then stained using antibodies to immune cell markers of interest. In some experiments, the longitudinal kinetics of the proliferation and expansion of certain circulating cell types, such as CD8+ T cells, NK cells, and Treg cells, is also determined, as well as the ratio of CD8+ T cells and NK cells to CD4+CD25+FoxP3+ Treg cells. In some experiments, the mice are assessed for vascular leakage, such as by assessing for edema and lymphocyte infiltration in certain organs like the lung and liver as determined by organ wet weight and histology.

[0810] In some studies, vascular leakage was assessed in order to assess potential toxicity-related effects mediated by IL-2 based therapies by performing the following method. Repeated dose toxicity studies were conducted using C57BL %6 female mice that were purchased from Charles River Laboratories and were 8-10 weeks old weighing 18-22 grams at the start of study. Groups of 5 mice received daily intraperitoneal injections of masked and non-masked IL-2 constructs in PBS daily for 4 or 5 days. The constructs tested included AK081, AK111, AK167, and AK168. A control antibody was also administered as a control. Two hours after the last dose, all mice received an intravenous injection of 0.1 ml of 1% Evans blue (Sigma, cat #E2129) in PBS. Two hours after Evans blue administration, mice were anesthetized and perfused with 10 U/mi heparin in PBS. Spleen, lung and liver were harvested and fixed in 3 ml of 4% PFA 2 days at 4° C. prior to measuring the absorbance of the supernatant at 650 nm with NanoDrop OneC (Thermo Fisher Scientific, Waltham, Mass.) as an indicator of vascular leak of Evans blue. Fixed organs were embedded in paraffin, sectioned, and stained with hematoxylin and eosin. Histopathological studies and quantification were carried out by NovoVita Histopath Laboratory. LLC. (Allston, Mass.) according to standard procedures. FIGS. 25A-50D depict results from an in vivo study as described above for assessing vascular leakage using the exemplary masked IL-2 polypeptide constructs AK111 and AK168, as well as the non-masked IL-2 polypeptide constructs AK081 and AK167, and an anti-RSV control. FIG. 25A shows the percentage (%) of body weight loss, and FIGS. 25B, 25C and 25D shows the weight in grams of the liver, lung, and spleen, respectively, for each.

[0811] Vascular leakage as indicated by measuring the extent of dye leakage into tissues was also assessed for the AK081, AK111, AK167, and AK168 constructs, along with an anti-RSV control, with results shown in FIGS. 26A and 26B for the liver and lung, respectively. The extent of dye leakage was measured based on absorbance at 650 nm.

[0812] Vascular leakage as indicated by measuring the extent of mononuclear cell perivascular invasion into the liver and lung was also assessed for the AK081, AK111, AK167, and AK168 constructs, along with an anti-RSV control, with results shown in FIGS. 27A and 27B for the liver and lung, respectively. The average number of mononuclear cells in the liver (FIG. 27A) and the average number of mononuclear cells in the lung (FIG. 27B) depicted for each. As shown in FIG. 27B, for instance, the masked IL-2 polypeptide constructs AK111 and AK168 did not result in a detectable number of mononuclear cells in the lung, unlike the non-masked constructs AK081 and AK167.

### Infiltrating Immune Cell Phenotype

[0813] The phenotype of immune cells infiltrating tumors in vivo in mouse models treated with the masked IL-2 polypeptide constructs generated in Example 1 is assessed. Mice are treated with the constructs and the phenotype of tumor-infiltrating immune cells is assessed. In some experiments, some mice are treated with controls for comparison. In some experiments, some mice are treated with aldesleukin as a control for masked IL-2 polypeptide treatment. Mice bearing tumors are treated with a construct, aldesleukin, or another control, and tumors, tissues such as liver, lung, and spleen, and blood, are collected at various time points following the initial dose, such as five days, seven days, or ten days after the initial dose. In some experiments, immune cells are isolated from the tumors, tissues, and blood, and are subject to phenotypic assessment using flow cytometry. In some experiments, the isolated immune cells are assessed using markers of interest, such as those for CD8+ T cells, Memory CD8+ T cells, activated NK cells. CD4+ T cells, and CD4+ Treg cells.

[0814] In some studies, the phenotype of immune cells infiltrating tumors in vivo was assessed using the following method. C57BL/6 female mice were purchased from Charles River Laboratories and were 8-10 weeks old at the start of study. MC38 tumor cells (5×10′ cells per mouse) were injected subcutaneously into the right flank of each mouse. Upon reaching ˜100 mm³ sized tumors (day 0), the mice received a single 2 mg/kg intravenous dose of the construct of interest (e.g., a non-masked parental IL-2 polypeptide construct, a masked IL-2 polypeptide construct, or a non-cleavable masked IL-2 polypeptide construct) in PBS. On day 5, mice were euthanized by C02 asphyxiation and tumors, livers, spleens and blood were harvested. Cell suspensions were prepared from spleens by mechanical disruption and and passing through a 40 μm cell strainer. The tumor tissues were enzymatically digested using Miltenyi Tumor Dissociation Kit reagents (Miltenyi cat #130-096-730) and the gentleMACS Dissociator (Miltenyi) was used for the mechanical dissociation steps. Red blood cells in the spleen and tumor cell suspensions and blood were lysed using ACK buffer (Gibco cat #A10492). The cell suspensions were stained with the following antibodies: CD45 (clone 30-F11, eBioscience), CD3 (clone 2C11, Biolegend), CD8 (clone 53-6.7, BD Biosciences), CD4 (clone RM-45, BD Biosciences), FOXP3 (MF-14, Biolegend), CD25 (3C7, Biolegend), CD44 (clone IM7, eBioscience), and NKp46 (29A1.4, eBioscience). Data acquisition was carried out on the MACSQuant Analyzer low cytometer (Milenyi) and data were analyzed using the FlowJo.

[0815] Results from studies testing the in vivo responses of CD4, CD8, NK, and Treg percentages in spleen, blood, and tumor, as carried out as described above, using the AK032, AK081, AK111, AK167, and AK168 constructs, as well as an anti-RSV IgG control, are shown in FIGS. 20A-20L. AK111 and AK168 are exemplary masked IL-2 polypeptide constructs.

[0816] Results from studies testing the in vivo responses of CD4, CD8, NK, and Treg percentages in spleen, blood, and tumor, as carried out as described above, using the AK167, AK168, AK191, AK197, AK203, AK209, and AK211 constructs, as well as an anti-RSV IgG control, are shown in FIGS. 21A-21L. AK168, AK191, AK197, AK203, and AK209 are exemplary masked IL-2 polypeptide constructs that each include a different cleavable peptide sequence in the linker connecting the IL-2 polypeptide to the half-life extension moiety. Statistical analysis was performed using One-way ANOVA as compared to the non-cleavable AK211 construct.

[0817] Results from studies testing the in vivo responses of CD4, CD8, NK, and Treg percentages in spleen, blood, and tumor, as carried out as described above, using the AK235, AK191, AK192, AK193, AK210, AK189, AK19X, and AK211 constructs are shown in FIGS. 22A-22L. AK191, AK192, AK193, AK210, AK189, and AK190 are exemplary masked IL-2 polypeptide constructs that each include a cleavable peptide sequence in the linker connecting the IL-2 polypeptide to the half-life extension moiety. The linker sequence also differs among these constructs, depending on the linker sequence utilized. AK189, AK190, and AK210 include an IL-2 polypeptide having a C125A mutation, and AK191, AK192, and AK193 include an IL-2 polypeptide having C125A. R38A, F42A, Y45A, and E62A mutations. The AK235 construct is a non-masked construct and the AK211 construct includes a non-cleavable linker sequence. Statistical analysis was performed using One-way ANOVA as compared to the non-cleavable AK211 construct.

[0818] Results from studies testing the in vivo T cell activation in spleen, blood, and tumor, as carried out as described above, using the AK235, AK191, AK192, AK193, AK210, AK189, AK190, and AK211 constructs, as described above, are shown in FIGS. 23A-23I. T cell activation was measured as the mean fluorescence intensity (MFI) of CD25 in CD8+ T cells, CD4+ T cells, or Foxp3-+ cells in the spleen, blood, and tumor. Statistical analysis was performed using One-way ANOVA as compared to the non-cleavable AK211 construct.

### In Vivo Cleavage

[0819] The in vivo cleavage of masked LL-2 cytokine constructs is assessed. In some studies, a control antibody is administered for comparison. In some studies, in vivo cleavage is assessed by administering the construct of interest in a mouse and, after a certain period of time, capturing human IgG and then measuring the levels of, e.g., human IgG, CD122, and IL-2.

[0820] In some studies testing the in vivo cleavage of masked IL-2 polypeptide constructs, drug levels (i.e., levels of the administered construct, including cleavage byproducts) were determined using ELISAs utilizing anti-human IgG (clone M1310G05, Biolegend) as the capture antibody and various detection antibodies. HRP or biotin conjugated detection antibodies against human IgG (ab97225, Abcam) or CD122 (clone 9A2, Ancell) and IL-2 (Poly5176, Biolegend) were utilized to detect total and non-cleaved drug levels, respectively. The concentrations of cleaved and released IL-2 is calculated by subtracting non-cleaved (i.e., intact) from total drug concentrations. FIGS. 24A-24D depict the results from studies testing the in vivo cleavage of the exemplary masked IL-2 polypeptide constructs AK168 (cleavable peptide sequence: MPYDLYHP; SEQ ID NO: 24) and AK209 (cleavable peptide sequence: VPLSLY; SEQ ID NO: 28). The AK167 construct is a cleavable non-masked IL-2 polypeptide construct that includes the same IL-2 polypeptide as the masked AK168 construct. As shown in FIGS. 24A-24D, both the masked (AK168 and AK209) and non-masked (AK167) constructs were effectively cleaved, and both cleavable peptide sequences were cleaved. FIG. 24E depicts results from a pharmacokinetic study of total plasma IgG concentration (μg/mL) for total levels of the AK167, AK168, and AK209 constructs, and for levels of non-cleaved forms of each construct.

### Tumor Eradication and Inhibition of Metastasis

[0821] The ability of the masked IL-2 polypeptide constructs generated in Example 1 to promote tumor eradication and to inhibit metastasis is assessed in vivo using mouse models, such as syngeneic MC38. CT26, and B16F10 tumor models.

[0822] Mice are implanted with tumor cells subcutaneously, and tumors are allowed to grow to a palpable size. Tumor-bearing mice are treated with the masked IL-2 constructs or the masked IL-15 polypeptide constructs and tumor volume is measured over the course of treatment. In some experiments, some mice are treated with controls for comparison. In some experiments, some mice are treated with aldesleukin as a control for masked IL-2 polypeptide treatment. Tumor volume is measured periodically over the course of treatment. In some experiments, body weight is also measured periodically over the course of treatment. In some experiments, plasma samples are produced over the course of the treatment and analyzed for pharmacokinetics, pharmacodynamics, cleavage, and blood markers, such as those for CD8+ T cells, Memory (D8+ T cells, activated NK cells, CD4+ T cells, and CD4+ Treg cells.

[0823] The capability of the masked IL-2 polypeptide constructs to inhibit metastasis is also assessed in vivo using mouse models suitable for metastasis studies, such as syngeneie CT26 tumor models for assessing lung metastasis. Mice are implanted with tumor cells subcutaneously. In some experiments, tumors are allowed to grow to a palpable size prior to treatment. In some experiments, treatment begins before tumors grow to palpable size. Tumor-bearing mice are treated with the masked IL-2 constructs are assessed for tumor cell metastasis into tissues such as lungs, liver, and lymph nodes.

[0824] In some studies, a syngeneic tumor model was used to assess the ability of masked IL-2 polypeptide constructs to reduce tumor volume in accordance with the following method. C57BL/6 female mice were purchased from Charles River Laboratories and were 8-10 weeks old at the start of study. MC38 tumor cells (5×105 cells per mouse) were injected subcutaneously into the right flank of each mouse. Upon reaching ˜125 mm3 sized tumors (day 0), the mice were randomized to receive 2 mg/kg doses of AK081, AK111, AK167, or AK168, or an anti-RSV antibody as a control, in PBS. Mice were dosed intraperitoneally, three times a week for 6 doses. Tumor volume was calculated (Length*(Width\hat{ }2)/2) using dial calipers and body weights were recorded twice weekly. FIGS. 28A and 28B show results from a syngeneic tumor model study that assessed tumor volume and body weight over the course of treatment. As shown in FIG. 28A, treatment using exemplary IL-2 polypeptide constructs, including the masked constructs AK111 and AK168, resulted in tumor growth inhibition over time as compared to the anti-RSV control. As shown in FIG. 28B, there was a general lack of body weight reduction observed when the mice were treated with the masked constructs AK111 and AK168.

### Bioactivity in Cynomolgus Monkeys

[0825] The in vivo bioactivity of the masked IL-2 polypeptide constructs generated in Example 1 is assessed in vivo in cynomolgus monkeys. Cynomolgus monkeys are treated with the constructs and in vivo bioactivity, pharmacokinetics, and cleavage is assessed. In some experiments, some monkeys are treated with controls for comparison. In some experiments, some monkeys are treated with aldesleukin as a control for masked IL-2 polypeptide treatment. In some experiments, the monkeys are treated with various doses of the construct, aldesleukin, or other control. Blood is collected from the monkeys at various time points and is then evaluated for certain cell types, such as CD8+ T cells, Memory CD8+ T cells, activated NK cells, CD4+ T cells, and CD4+ Treg cells, and/or markers of interest, such as for the dose-response of total lymphocytes, Ki67+, and of soluble CD25. In some experiments, the longitudinal kinetics of the proliferation and expansion of certain circulating T and NK cell types is assessed. In some experiments, pharmacokinetics and cleavage of the masked IL-2 polypeptide constructs are determined by ELISA, PAGE, and mass spectrometry.

[0826] To test the safety profile of exemplary masked IL-2 polypeptide constructs in non-human primates, a dose ranging study is performed in accordance with the following method. Groups of 3 healthy male cynomolgus monkeys (Macaca fascicularis) are randomly assigned to receive a single intravenous bolus dose of 2 mL/kg of activatable (i.e., cleavable) masked IL-2 polypeptide proteins or non-cleavable masked IL-2 polypeptide proteins at 10, 30 and 100 nmol/kg in 100 mM sodium citrate buffer (pH 5.5). A third group receives the parental non-masked, cleavable protein at 3, 10 and 30 nmol/kg as a positive control. This third group is dosed at a lower range to account for higher potency of the parental non-masked molecules. Doses are calculated in moles to account for differences in molecular weight. Blood samples are collected before dosing and 1, 24, 48, 72, 96, 168, 264 and 336 hours post-dosing. An automated hematology analyzer is used to monitor changes in lymphocyte subsets and serum chemistry. Total and intact (i.e., non-cleaved) drug levels are measured from plasma using custom ELISA as described above. Soluble CD25 levels are measured with an ELISA (R&D systems, cat #DR2A00) to monitor immune stimulation. Plasma levels of inflammatory cytokines are quantified using custom multiplexed electrochemiluminescence assay (Meso Scale Discovery). Blood pressure is monitored as an indicator of vascular leak syndrome. PK is analyzed using an ELISA that captures IL-2 and detects human Fc and by an ELISA that captures human Fc and detects human Fc.

### Example 4

[0827] C57BL/6 female mice were purchased from Charles River Laboratories and were 8-10 weeks old at the start of study. MC38 tumor cells (5×10⁵ cells per mouse) were injected subcutaneously into the right flank of each mouse. Upon reaching ˜100 mm sized tumors (day 0), the mice received a single high dose intraperitoneal dose of various Fc-IL-2 constructs in PBS. Plasma were collected at 5 min, days 3, 5 and 7 after dosing.
[0828] The constructs used are shown in FIG. 68:

[0829] Immunophenotyping was performed using a FACS-based method. On day 5, mice were euthanized by CO2 asphyxiation and tumors, livers, spleens and blood were harvested. Cell suspensions were prepared from spleens by mechanical disruption and and passing through a 40 μm cell strainer. The tumor tissues were enzymatically digested using Miltenyi Tumor Dissociation Kit reagents (Miltenyi cat #130-096-730) and the gentleMACS Dissociator (Miltenyi) was used for the mechanical dissociation steps. Red blood cells in the spleen and tumor cell suspensions and blood were lysed using ACK buffer (Gibco cat #A10492).

[0830] The cell suspensions were stained with the following antibodies: CD45 (clone 30-F11, eBioscience), CD3 (clone 2C11, Biolegend), CD8 (clone 53-6.7, BD Biosciences), CD4 (clone RM-45, BD Biosciences). Data acquisition was carried out on the MACSQuant Analyzer flow cytometer (Milenyi) and data were analyzed using the FlowJo.

[0831] Drug levels were determined using ELISAs utilizing anti-human IgG (clone M1310G05, Biolegend) as the capture antibody and various detection antibodies. HRP or biotin conjugated detection antibodies against human IgG (ab97225, Abcam) or CD122 (clone 9A2, Ancell) and IL-2 (Poly5176, Biolegend) were utilized to detect total and non-cleaved drug levels, respectively.

[0832] AK471 with I253A FcRn mutation induced robust CD8 T cells expansion in the TME while remaining inactive in the periphery as shown in FIGS. 29A and 29B.

[0833] AK471 has slightly shorter half-life compared to aglyco-hIgG1 as shown in FIGS. 30 A, B and C.

[0834] There is no evidence of cleavage or decapitation with AK471 in the plasma (FIGS. 31 A, B and C).

### Example 5

### Summary of Cys to Ser Mutations on CD122

[0835] The two free cysteines on the CD122 masking domain were mutated to serines to increase protein stability and mitigate developability risks including, without being limited as to theory, aggregation, oxidation, and immunogenicity. The mutant was evaluated in an accelerated stability study, where the control and the Cys to Ser mutant was incubated for a prolonged time (3 weeks), with elevated temperature (40° C.), and in multiple pHs. Various analyses were performed to assess the impact of the cysteine mutations. The results demonstrate that the Cys to Ser mutant clearly enhanced the protein stability as evidenced by significantly reduced aggregation under stress. After 3 weeks incubation at pH8.0, the constructs with the cysteines mutated exhibit low levels of aggregation as compared to the control constructs, which do not contain the cysteine mutations, that have greater than fifty (50) percent aggregation as measured by SEC-HPLC. CE-SDS demonstrated that the construct with the mutated cysteines remains unaggregated (>99%) for pH6.0 and pH8.0 incubation, where the control constructs contained levels of aggregation up to fifteen (15) percent 1.

[0836] In addition, constructs with the mutated cysteines in the CD122 masking protein interact with the IL-2 protein in a similar manner as the control constructs, which contain a wild-type CD122 masking protein (i.e. without mutation of the cysteine residues). In addition, the constructs with the mutated cysteines in the CD122 masking protein are similar in both functional assays and pharmacodynamics studies as the control constructs, which contain a CD122 masking protein without the cysteine mutations.

### Experimental Protocols

### Stability Study

[0837] Samples were incubated in a Galaxy 170 S air incubator set to 40° C. Three buffer systems were tested: 20 mM Citrate pH 5.0, 20 mM histidine pH 6.0, and 20 mM tris pH 8.0. The pH of each was calibrated at room temperature (approximately 27C) and buffers were adjusted to within 0.05 pH units with HCl/NaOH. Buffers were filtered by 0.22 um bottle top filters. Samples were buffer exchanged approximately 3000-fold into starting buffer via spin concentration. Sample aliquots were removed under sterile conditions at day 0, 1, 3, 7, 14, and 21, and stored at −80° C. before being evaluated in the below analytical tests.

### SEC-HPLC

[0838] An HPLC system was used to assess the aggregation level in the incubated samples: the system was calibrated with along with molecular weight standards. Levels of high molecular weight species (“HMWS”) were measured in each sample. Increases in HMWS indicated increasing levels of aggregation.

[0839] The results of these studies is shown in FIGS. 32A and 32B. The key represents ‘AK’ molecule numbers, where AK341 is a Cys to Ser mutant and AK209 is a control.

### CE-SDS

[0840] CE-SDS was run on a labchip machine. In general, a reducing agent was used for experiments under reducing conditions. Samples were subjected to high heat before samples were loaded into 96-well PCR plate. Recombinant human IL-2 was used as a low molecular weight protein control. Levels of HMWS were measured in each sample. Increases in HMWS indicated increasing levels of aggregation.

[0841] The results of these studies is shown in FIGS. 33A-33D. The key represents ‘AK’ molecule numbers, where AK341 is a Cys to Ser mutant and AK209 is a control.

### Example 6

[0842] The constructs used are as follows:

| | Protease | Protease | Half-life |
|---|---|---|---|
| AK# | substrate | site on | extension |
| AK209 | VPLSLY | IL-2 | Agly-hIgG1 |
| AK341* | VPLSLY | IL-2 | Agly-hIgG1 |
| AK438 | VPLSLY | CD 122 | Agly-hIgG1 |
| AK471 | VPLSLY | IL-2 | FcRn-I253A |
| AK50S | VPLSLY | CD 122 | FeRn-I253A |
| AKS04 | VPLSLY | IL-2 | FcRn-hIgG4 |
| AK511 | VPLSLY | CD 122 | FcRn-hIgG4 |
| AK203 | DSGGFMLT | IL-2 | Agly-hIgG1 |
| AK442 | DSGGPVTT | CD 122 | Agly-hIgG1 |
| AK168 | MPYDLYHP | IL-2 | Agly-hIgG1 |
| AK252 | MPYDLYHP | CD 122 | Agly-hIgG1 |
| AK509 | MPYDLYHP | IL-2 | FcRn-I253A |
| AK510 | MPYDLYHP | CD122 | FcRn-I253A |
| AK191 | RAAAVKSP | IL-2 | Agly-hIgG1 |
| AK503 | RAAAVKSP | CD122 | Agly-hIgG1 |

AK211 - Non-cleavable
AK253 - parental (no mask);
no cleavage site; always active
AK341* contains two cys -> ser mutations on CD122.

[0843] i. Anti-Tumor Activity—AK438 and AK442

[0844] C57BL/6 female mice were purchased from Charles River Laboratories and were 8-10 weeks old at the start of study. MC38 tumor cells (5×105 cells per mouse) were injected subcutaneously into the right flank of each mouse. Upon reaching ˜100 mm3 sized tumors (day 0), the mice were randomized to receive Fc-IL-2 constructs in PBS. Mice were dosed intravenously on days 0, 3 and 6. Tumor volume was calculated (Length*(Width\hat{ }2)/2) using dial calipers and body weights were recorded twice weekly. Mice were sacrificed upon reaching humane end points of tumor burden (2000 mm3) or body weight loss due to toxicity (20%).

[0845] Results are shown in FIGS. 34A and B.

AK341* Contains two cys→ser mutations on CD122

[0846] ii. Peripheral (Spleen) Vs Tumor CD8 T Cell Expansion—AK438 and AK442

[0847] C57BL/6 female mice were purchased from Charles River Laboratories and were 8-10 weeks old at the start of study. MC38 tumor cells (5×10 cells per mouse) were injected subcutaneously into the right flank of each mouse. Upon reaching ˜100 mm³ sized tumors (day 0), the mice were randomized to receive AK253 at very low dose level and all other Fc-IL-2 constructs at high dose level in PBS. Mice were dosed intravenously on days 0, 3 and 6.

[0848] Immunophenotyping on day 7 was performed using a FACS-based method from peripheral blood. Red blood cells were lysed using ACK buffer (Gibco cat #A10492). The cell suspensions were stained with the following antibodies: CD45 (clone 30-F11, eBioscience), CD3 (clone 2C11, Biolegend), CDR (clone 53-6.7. BD Biosciences), CD4 (clone RM-45, BD Biosciences) and Ki-67 (clone SOLA15, eBioscience). Data acquisition was carried out on the MACSQuant Analyzer flow cytometer (Milenyi) and data were analyzed using the FlowJo. A one-way ANOVA with Bonferonni's post-test was performed to determine the statistical significance of treatment vs. control AK211)(*P<0.05; **P<0.01; ***P<0.001; ****P<0.0001).

[0849] Results are shown in FIGS. 35A and B.

[0850] iii. Anti-tumor activity—AK252, AK438, AK209 and AK471

[0851] C57BL/6 female mice were purchased from Charles River Laboratories and were 8-10 weeks old at the start of study. MC38 tumor cells (5×105 cells per mouse) were injected subcutaneously into the right flank of each mouse. Upon reaching ˜100 mm3 sized tumors (day 0), the mice were randomized to receive AK253 at very low dose level and all other Fc-IL-2 constructs at high dose level in PBS. Mice were dosed intravenously on days 0, 3 and 6. Tumor volume was calculated (Length*(Width\hat{ }2)/2) using dial calipers and body weights were recorded twice weekly. Mice were sacrificed upon reaching humane end points of tumor burden (2000 mm3) or body weight loss due to toxicity (20%).

[0852] Results are shown in FIGS. 36A and 368.

[0853] iv. Peripheral (Spleen) Vs Tumor CD8 T Cell Expansion—AK252, AK438, AK209, AK471

[0854] C57BL/6 female mice were purchased from Charles River Laboratories and were 8-10 weeks old at the start of study. MC38 tumor cells (5×105 cells per mouse) were injected subcutaneously into the right flank of each mouse. Upon reaching ˜100 mm3 sized tumors (day 0), the mice were randomized to receive AK253 at very low dose level and all other Fc-IL-2 constructs at high dose level in PBS. Mice were dosed intravenously on days 0, 3 and 6.

[0855] Immunophenotyping on day 7 was performed using a FACS-based method from peripheral blood. Red blood cells were lysed using ACK buffer (Gibco cat #A10492). The cell suspensions were stained with the following antibodies: CD45 (clone 30-F11, eBioscience). CD3 (clone 2C11, Biolegend), CD8 (clone 53-6.7, BD Biosciences), CD4 (clone RM-45, BD Biosciences) and Ki-67 (clone SOLA15, eBioscience). Data acquisition was carried out on the MACSQuant Analyzer flow cytometer (Milenyi) and data were analyzed using the FlowJo. A one-way ANOVA with Bonferonni's post-test was performed to determine the statistical significance of treatment vs. control AK211) (*P<0.05; **P<0.01; ***P<0.001; ****P<0.0001).

[0856] Results are shown in FIGS. 37A and 37B.

[0857] v. Anti-Tumor Activity—AK252, AK442, AK203, AK508 and AK510

[0858] C57BL/6 female mice were purchased from Charles River Laboratories and were 8-10 weeks old at the start of study. MC38 tumor cells (5×105 cells per mouse) were injected subcutaneously into the right flank of each mouse. Upon reaching ˜100 mm3 sized tumors (day 0), the mice were randomized to receive AK253 at very low dose level and all other Fc-IL-2 constructs at high dose level in PBS. Mice were dosed intravenously on days 0, 3 and 6. Tumor volume was calculated (Length*(Width\hat{ }2)2) using dial calipers and body weights were recorded twice weekly. Mice were sacrificed upon reaching humane end points of tumor burden (2000 mm3) or body weight loss due to toxicity (20%).

[0859] Results are shown in FIGS. 38A and 388.

[0860] vi. Peripheral (Spleen) Vs Tumor CD8 T Cell Expansion—AK252, AK442, AK203, AK5W and AK510

[0861] C57BL/6 female mice were purchased from Charles River Laboratories and were 8-10 weeks old at the start of study. MC38 tumor cells (5×105 cells per mouse) were injected subcutaneously into the right flank of each mouse. Upon reaching ˜100 mm3 sized tumors (day 0), the mice were randomized to receive AK253 at very low dose level and all other Fc-IL-2 constructs at high dose level in PBS. Mice were dosed intravenously on days 0, 3 and 6.

[0862] Immunophenotyping on day 7 was performed using a FACS-based method from peripheral blood. Red blood cells were lysed using ACK buffer (Gibco cat #A10492). The cell suspensions were stained with the following antibodies: CD45 (clone 30-F11, eBioscience), CD3 (clone 2C11, Biolegend). CD8 (clone 53-6.7, BD Biosciences), CD4 (clone RM-45, BD Biosciences) and Ki-67 (clone SOLA) 5, eBioscience). Data acquisition was carried out on the MACSQuant Analyzer flow cytometer (Milenyi) and data were analyzed using the FlowJo. A one-way ANOVA with Bonferonni's post-test was performed to determine the statistical significance of treatment vs. control AK211) (*P<0.05; **P<0.01: ***P<0.001: ****P<0.0001).

[0863] Results are shown in FIGS. 39A and 39B.

[0864] vii. Anti-tumor activity—AK252, AK508, AK509, AK510, AK511

[0865] C57BL/6 female mice were purchased from Charles River Laboratories and were 8-10 weeks old at the start of study. MC38 tumor cells (5×105 cells per mouse) were injected subcutaneously into the right flank of each mouse. Upon reaching ˜100 mm3 sized tumors (day 0), the mice were randomized to receive AK253 at very low dose level and all other Fc-IL-2 constructs at high dose level in PBS. Mice were dosed intravenously on days 0, 3 and 6. Tumor volume was calculated (Length*(Width\hat{ }2)/2) using dial calipers and body weights were recorded twice weekly. Mice were sacrificed upon reaching humane end points of tumor burden (2000 mm3) or body weight loss due to toxicity (20%).

[0866] Results are shown in FIGS. 40A-40D.

[0867] viii. Peripheral (Spleen) Vs Tumor CD8 T Cell Expansion—AK252, AK508, AK509, AK510, AK511

[0868] C57BL/6 female mice were purchased from Charles River Laboratories and were 8-10 weeks old at the start of study. MC38 tumor cells (5×105 cells per mouse) were injected subcutaneously into the right flank of each mouse. Upon reaching ˜100 mm3 sized tumors (day 0), the mice were randomized to receive 40 AK253 at very low dose level and all other Fc-IL-2 constructs at high dose level in PBS. Mice were dosed intravenously on days 0, 3 and 6.

[0869] Immunophenotyping on day 7 was performed using a FACS-based method from peripheral blood. Red blood cells were lysed using ACK buffer (Gibco cat #A10492). The cell suspensions were stained with the following antibodies: CD45 (clone 30-F11, eBioscience), CD3 (clone 2C11, Biolegend), CD8 (clone 53-6.7. BD Biosciences), CD4 (clone RM-45, BD Biosciences) and Ki-67 (clone SOLA15, eBioscience). Data acquisition was carried out on the MACSQuant Analyzer flow cytometer (Milenyi) and data were analyzed using the FlowJo. A one-way ANOVA with Bonferonni's post-test was performed to determine the statistical significance of treatment vs. control AK211)(*P<0.05; **P<0.01; ***P<1.001; ****P<0.0001). AK252++ produced in-house lot #AK252-06B, AK252 produced by ATUM lot #AK252-A-01A.

[0870] Results shown in FIGS. 41A and 41B.

[0871] ix. Anti-Tumor Activity—AK252, AK43& AK442, AK209, AK341

[0872] C57BL/6 female mice were purchased from Charles River Laboratories and were 8-10 weeks old at the start of study. MC38 tumor cells (5×105 cells per mouse) were injected subcutaneously into the right flank of each mouse. Upon reaching ˜100 mm3 sized tumors (day 0), the mice were randomized to receive AK253 at very low dose level and all other Fc-IL-2 constructs at high dose level in PBS. Mice were dosed intravenously on days 0, 3 and 6. Tumor volume was calculated (Length*(Width\hat{ }2)/2) using dial calipers and body weights were recorded twice weekly. Mice were sacrificed upon reaching humane end points of tumor burden (2000 mm3) or body weight loss due to toxicity (20%).

[0873] Results are shown in FIGS. 42A and 42B.

[0874] x. Splenomegaly and Lung Edema—AK252, AK438, AK442, AK209, AK341

[0875] C57BL/6 female mice were purchased from Charles River Laboratories and were 8-10 weeks old at the start of study. MC38 tumor cells (5×105 cells per mouse) were injected subcutaneously into the right flank of each mouse. Upon reaching ˜100 mm3 sized tumors (day 0), the mice were randomized to receive AK253 at very low dose level and all other Fc-IL-2 constructs at high dose level in PBS. Mice were dosed intravenously on days 0, 3 and 6. Tissues were harvested and weighed on day 6.

[0876] Results are shown in FIGS. 43A and 43B.

### Example 7

[0877] i. Cleavage of Peptides by NAT Vs. RCC Culture Supernatant

[0878] Sequences comprising cleavage peptides (shown in bold below) were incubated in either ‘NAT’ (Normal Adjacent Tissue) or ‘RCC’ (Renal Cell Carcinoma) culture supernatants, to test the specificity of each peptide's cleavage.

[0879] To this end, peptide sequencing by mass spectrometry was used to identify cleaved fragments produced for the synthetic peptides shown in the table below, using a published technique called multiplexed substrate profiling by mass spectrometry (MSP-MS) (O'Donoghue A. J. et al. Nat Methods. 2012 November; 9(11):1095-100.) Cleavages were monitored in these reactions over time, and the peptides found to be cleaved in the earliest time points were deemed to be most sensitive to proteolytic activity in the conditioned media samples.

| | Synthetic | | | | | | |
|---|---|---|---|---|---|---|---|
| | Peptide | | | | | | |
| | Sequence | | | | | | |
| | (bolded | | | | | | |
| | sequences | | | | | | |
| | show | | | Earliest | | | |
| | the cleavable | | | cleaved | | Earliest | |
| | peptide; | | | time | | cleaved | |
| Sub- | *indicates | | | point- | | time point- | |
| strate | cleavage site) | NAT | RCC | NAT | | RCC | |
| AK-15 | RSGVPLS*LYSGSG | 0 | 3/5 | | | 15 | min |
| | GGK | | | | | | |
| AK-18 | RSGMP*YDLY*HPS | 5/5 | 5/5 | 15 | min | 15 | min |
| | GK | | | | | | |
| AK-21 | RGPDSGGF*ML*TS | 3/5 | 5/5 | 15 | min | 15 | min |
| | GK | | | | | | |
| AK-28 | RGSGHEQLTVSGGS | 0 | 0 | | | | |
| | K | | | | | | |
| AK-49 | RSGR*AAAVKSPSG | 0 | 3/5 | | | 15-60-240 | min |
| | K | | | | | | |
| AK-02 | RGSGISSGLLSGRS | 5/5 | 5/5 | 15-60 | min | 15-60 | min |
| | *D*N*HSGK | | | | | | |
| AK-50 | RGDLLAVVA*ASGG | 0 | 5/5 | | | 15-60 | min |
| | K | | | | | | |
| AK-88 | RGGISSGLL*SG*R | 0 | 5/5 | | | 15-60 | min |
| | SGK | | | | | | |

[0880] Cleavage peptides DLLAVVA*AS and ISSGLL*SG*RS were found to be the most specific. Sequences comprising these peptides did not cleave in the NAT culture, but cleaved in every run in the RCC culture.

### Example 8

[0881] The following constructs used in this example are shown in FIG. 69.

[0882] Details on the domain features and sequences of each AK molecule is as follows:

| | | | |
|---|---|---|---|
| AK904 | 1^{st} polypeptide | DKTHTCPPCPAPELLGGPSVFLFPPKPKDTLMIS | DNA158 |
| | chain: | RTPEVTCVVVDVSHEDPEVKFNWYVDGVEVHNAK | |
| | Fc(Hole) | TKPREEQYASTYRVVSVLTVLHQDWLNGKEYKCK | |
| | | VSNKALPAPIEKTISKAKGQPREPQVCTLPPSRD | |
| | | ELTKNQVSLSCAVKGFYPSDIAVEWESNGQPENN | |
| | | YKTTPPVLDSDGSFFLVSKLTVDKSRWQQGNVFS | |
| | | CSVMHEALHNHYTQKSLSLSPGK | |
| | 2^{nd} polypeptide | DKTHTCPPCPAPELLGGPSVFLFPPKPKDTLMIS | AK904 |
| | chain: | RTPEVTCVVVDVSHEDPEVKFNWYVDGVEVHNAK | |
| | Fc(knob)-IL15 | TKPREEQYASTYRVVSVLTVLHQDWLNGKEYKCK | |
| | V1 Non- | VSNKALPAPIEKTISKAKGQPREPQVYTLPPCRD | |
| | cleavable | ELTKNQVSLWCLVKGFYPSDIAVEWESNGQPENN | |
| | (N71Q, N79Q) | YKTTPPVLDSDGSFFLYSKLTVDKSRWQQGNVFS | |
| | | CSVMHEALHNHYTQKSLSLSPGGGSSPPGGGSSG | |
| | | GGSGPSGSPGNWVNVISDLKKIEDLIQSMHIDAT | |
| | | LYTESDVHPSCKVTAMKCFLLELQVISLESGDAS | |
| | | IHDTVENLIILAQNSLSSNGQVTESGCKECEELE | |
| | | EKNIKEFLQSFVHIVQMFINTS | |
| AK910 | 1^{st} polypeptide | DKTHTCPPCPAPELLGGPSVFLFPPKPKDTLMIS | DNA440 |
| | chain: | RTPEVTCVVVDVSHEDPEVKFNWYVDGVEVHNAK | |
| | Fc(Hole) | TKPREEQYASTYRVVSVLTVLHQDWLNGKEYKCK | |
| | CD122(C122S, | VSNKALPAPIEKTISKAKGQPREPQVCTLPPSRD | |
| | C168S) | ELTKNQVSLSCAVKGFYPSDIAVEWESNGQPENN | |
| | | YKTTPPVLDSDGSFFLVSKLTVDKSRWQQGNVFS | |
| | | CSVMHEALHNHYTQKSLSLSPGPGSGSAVNGTSQ | |
| | | FTCFYNSRANISCVWSQDGALQDTSCQVHAWPDR | |
| | | RRWNQTCELLPVSQASWACNLILGAPDSQKLTTV | |
| | | DIVTLRVLCREGVRWRVMAIQDFKPFENLRLMAP | |
| | | ISLQVVHIVETHRSNISWEISQASHYFERHLEFE | |
| | | ARTLSPGHTWEEAPLLTLKQKQEWISLETLTPDT | |
| | | QYEFQVRVKPLQGEFTTWSPWSQPLAFRTKPAAL | |
| | | GKD | |
| | 2^{nd} polypeptide | DKTHTCPPCPAPELLGGPSVFLFPPKPKDTLMIS | DNA904 |
| | chain: | RTPEVTCVVVDVSHEDPEVKFNWYVDGVEVHNAK | |
| | Fc(knob)-IL15 | TKPREEQYASTYRVVSVLTVLHQDWLNGKEYKCK | |
| | V1 Non- | VSNKALPAPIEKTISKAKGQPREPQVYTLPPCRD | |
| | cleavable | ELTKNQVSLWCLVKGFYPSDIAVEWESNGQPENN | |
| | (N71Q, N79Q) | YKTTPPVLDSDGSFFLYSKITVDKSRWQQGNVFS | |
| | | CSVMHEALHNHYTQKSLSLSPGGGSSPPGGOSSG | |
| | | GGSGPSGSPGNWVNVISDLKKIEDLIQSMHIDAT | |
| | | LYTESDVHPSCKVTAMKCFLLELQVISLESGDAS | |
| | | LHDTVENLIILAQNSLSSNGQVTESGCKECEELE | |
| | | EKNIKEFLQSFVHIVQMFINTS | |
| AK932 | 1^{st} polypeptide | DKTHTCPPCPAPELLGGPSVFLFPPKPKDTLMIS | DNA440 |
| | chain: | RTPEVTCVVVDVSHEDPEVKFNWYVDGVEVHNAK | |
| | Fc(Hole) | TKPREEQYASTYRVVSVLTVLHQDWLNGKEYKCK | |
| | CD122(C122S, | VSNKALPAPIEKTISKAKGQPREPQVCTLPPSRD | |
| | C168S) | ELTKNQVSLSCAVKGFYPSDIAVEWESNGQPENN | |
| | | YKTTPPVLDSDGSFFLVSKLTVDKSRWQQGNVFS | |
| | | CSVMHEALHNHYTQKSLSLSPGPGSGSAVNGTSQ | |
| | | FTCFYNSRANISCVWSQDGALQDTSCQVHAWPDR | |
| | | RRWNQTCELLPVSQASWACNLILGAPDSQKLTTV | |
| | | DIVTLRVLCREGVRWRVMAIQDFKPFENLRLMAP | |
| | | ISLQVVHVETHRSNISWEISQASHYFERHLEFEA | |
| | | RTLSPGHTWEEAPLLTLKQKQEWISLETLTPDTQ | |
| | | YEFQVRVKPLQGEFTTWSPWSQPLAFRTKPAALG | |
| | | KD | |
| | 2^{nd} polypeptide | DKTHTCPPCPAPELLGGPSVFLFPPKPKDTLMIS | DNA924 |
| | chain: | RTPEVTCVVVDVSHEDPEVKFNWYVDGVEVHNAK | |
| | Fc(knob)- | TKPREEQYASTYRVVSVLTVLHQDWLNGKEYKCK | |
| | [DLLAVVAA]- | VSNKALPAPIEKTISKAKGQPREPQVYTLPPCRD | |
| | IL15 | ELTKNQVSLWCLVKGFYPSDIAVEWESNGQPENN | |
| | (N71Q, N79Q) | YKTTPPVLDSDGSFFLYSKLTVDKSRWQQGNVFS | |
| | *cleavable | CSVMHEALHNHYTQKSLSLSPGSGSDLLAVVAAS | |
| | peptide bolded | SGPGSGNWVNVISDLKKIEDLIQSMHIDATLYTE | |
| | | SDVHPSCKVTAMKCFLLELQVISLESGDASIHDT | |
| | | VENLIILAQNSLSSNGQVTESGCKECEELEEKNI | |
| | | KEFLQSFVHIVQMFINTS | |
| AK938 | 1^{st} polypeptide | DKTHTCPPCPAPELLGGPSVFLFPPKPKDTLMIS | DNA822 |
| | chain: | RTPEVTCVVVDVSHEDPEVKFNWYVDGVEVHNAK | |
| | Fc(hole)- | TKPREEQYASTYRVVSVLTVLHQDWLNGKEYKCK | |
| | [DLLAVVAA]- | VSNKALPAPIEKTISKAKGQPREPQVCTLPPSRD | |
| | CD122 | ELTKNQVSLSCAVKGFYPSDIAVEWESNGQPENN | |
| | *cleavable | YKTTPPVLDSDGSFFLVSKLTVDKSRWQQGNVFS | |
| | peptide bolded | CSVMHEALHNHYTQKSLSLSPGSGSPSGDLLAVV | |
| | | AASSGPGSOSPAVNGTSQFTCFYNSRANISCVWS | |
| | | QDGALQDTSCQVHAWPDRRRWNQTCELLPVSQAS | |
| | | WACNLILGAPDSQKLTTVDIVTLRVLCREGVRWR | |
| | | VMAIQDFKPFENLRLMAPISLQVVHVETHRSNIS | |
| | | WEISQASHYFERHLEFEARTLSPGHTWEEAPLLT | |
| | | LKQKQEWISLETLTPDTQYEFQVRVKPLQGEFTT | |
| | | WSPWSQPLAFRTKPAALGKD | |
| | 2^{nd} polypeptide | DKTHTCPPCPAPELLGGPSVFLFPPKPKDTLMIS | DNA904 |
| | chain: | RTPEVTCVVVDVSHEDPEVKFNWYVDGVEVHNAK | |
| | Fc(knob)-IL15 | TKPREEQYASTYRVVSVLTVLHQDWLNGKEYKCK | |
| | V1 Non- | VSNKALPAPIEKTISKAKGQPREPQVYTLPPCRD | |
| | cleavable | ELTKNQVSLWCLVKGFYPSDIAVEWESNGQPENN | |
| | (N71Q, N79Q) | YKTTPPVLDSDOSFFLYSKLTVDKSRWQQGNVFS | |
| | | CSVMHEALHNHYTQKSLSLSPGGGSSPPGGGSSG | |
| | | GGSGPSGSPGNWVNVISDLKKIEDLIQSMHIDAT | |
| | | LYTESDVHPSCKVTAMKCFLLELQVISLESGDAS | |
| | | IHDTVENLIILAQNSLSSNGQVTESGCKECEELE | |
| | | EKNIKEFLQSFVHIVQMFINTS | |
| AK930 | 1^{st} polypeptide | DKTHTCPPCPAPELLGGPSVFLFPPKPKDTLMIS | DNA440 |
| | chain: | RTPEVTCVVVDVSHEDPEVKFNWYVDGVEVHNAK | |
| | Fc(hole) | TKPREEQYASTYRVVSVLTVLHQDWLNGKEYKCK | |
| | CD122(C122S, | VSNKALPAPIEKTISKAKGQPREPQVCTLPPSRD | |
| | C168S) | ELTKNQVSLSCAVKGFYPSDIAVEWESNGQPENN | |
| | | YKTTPPVLDSDGSFFLVSKLTVDKSRWQQGNVFS | |
| | | CSVMHEALHNHYTQKSLSLSPGPGSGSAVNGTSQ | |
| | | FTCFYNSRANISCVWSQDGALQDTSCQVHAWPDR | |
| | | RRWNQTCELLPVSQASWACNLILGAPDSQKLTTV | |
| | | DIVTLRVLCREGVRWRVMAIQDFKPFENLRLMAP | |
| | | ISLQVVHIVETHRSNISWEISQASHYFERHLEFE | |
| | | ARTLSPGHTWEEAPLLTLKQKQEWISLETLTPDT | |
| | | QYEFQVRVKPLQGEFTTWSPWSQPLAFRTKPAAL | |
| | | GKD | |
| | 2^{nd} polypeptide | DKTHTCPPCPAPELLGGPSVFLFPPKPKDTLMIS | DNA922 |
| | chain: | RTPEVTCVVVDVSHEDPEVKFNWYVDGVEVHNAK | |
| | Fc(knob)- | TKPREEQYASTYRVVSVLTVLHQDWLNGKEYKCK | |
| | (ISSGLLSGR) | VSNKALPAPIEKTISKAKGQPREPQVYTLPPCRD | |
| | IL15 | ELTKNQVSLWCLVKGFYPSDIAVEWESNGQPENN | |
| | (N71Q, N799) | YKTTPPVLDSDGSFFLYSKLTVDKSRWQQGNVFS | |
| | *cleavable | CSVMHEALHNHYTQKSLSLSPGGGSSGGSPISSG | |
| | peptide bolded | LLSGRSSGPGSGSNWVNVISDLKKIEDLIQSMHI | |
| | | DATLYTESDVHPSCKVTAMKCFLLELQVISLESG | |
| | | DASIHDTVENLIILAQNSLSSNGQVTESGCKECE | |
| | | ELEEKNIKEFLQSFVHIVQMFINTS | |
| AK936 | 1^{st} polypeptide | DKTHTCPPCPAPELLGGPSVFLFPPKPKDTLMIS | DNA823 |
| | chain: | RTPEVTCVVVDVSHEDPEVKFNWYVDGVEVHNAK | |
| | Fc(hole)- | TKPREEQYASTYRVVSVLTVLHQDWLNGKEYKCK | |
| | (ISSGLLSGR) | VSNKALPAPIEKTISKAKGQPREPQVCTLPPSRD | |
| | CD122 | ELTKNQVSLSCAVKGFYPSDIAVEWESNGQPENN | |
| | | YKTTPPVLDSDGSFFLVSKLTVDKSRWQQGNVFS | |
| | | CSVMHEALHNHYTQKSLSLSPGGPPSGSSPISSG | |
| | | LLSGRSSGGGAVNGTSQFTCFYNSRANISCVWSQ | |
| | | DGALQDTSCQVHAWPDRRRWNQTCELLPVSQASW | |
| | | ACNLILGAPDSQKLTTVDIVTLRVLCREGVRWRV | |
| | | MAIQDFKPFENLRLMAPISLQVVHVETHRSNISW | |
| | | EISQASHYFERHLEFEARTLSPGHTWEEAPLLTL | |
| | | KQKQEWISLETLTPDTQYEFQVRVKPLQGEFTTW | |
| | | SPWSQPLAFRTKPAALGKD | |
| | 2^{nd} polypeptide | DKTHTCPPCPAPELLGGPSVFLFPPKPKDTLMIS | DNA904 |
| | chain: | RTPEVTCVVVDVSHEDPEVKFNWYVDGVEVHNAK | |
| | Fc(knob)-IL15 | TKPREEQYASTYRVVSVLTVLHQDWLNGKEYKCK | |
| | V1 Non- | VSNKALPAPIEKTISKAKGQPREPQVYTLPPCRD | |
| | cleavable | ELTKNQVSLWCLVKGFYPSDIAVEWESNGQPENN | |
| | (N71Q, N79Q) | YKTTPPVLDSDGSFFLYSKLTVDKSRWQQGNVFS | |
| | | CSVMHEALHNHYTQKSLSLSPGGGSSPPGGGSSG | |
| | | GGSGPSGSPGNWVNVISDLKKIEDLIQSMHIDAT | |
| | | LYTESDVHPSCKVTAMKCFLLELQVISLESGDAS | |
| | | IHDTVENLIILAQNSLSSNGQVTESGCKECEELE | |
| | | EKNIKEFLQSFVHIVQMFINTS | |

[0883] Importantly. AK932 and AK930, and their ‘flipped’ counterparts AK938 and AK936 include a peptide substrate (the sequence of which is depicted in the box above each molecule and bolded in the sequence table table). AK904 is a non-cleavable unmasked construct, and AK910 is a non-cleavable masked construct, both acting as negative controls.

[0884] The above AK molecules include an IL-15 domain, however it will be appreciated that however the results and conclusions of this data are equally relevant for IL-2 constructs.

### Cleavage was Achieved for Masked Constructs Including a Peptide Substrate.

[0885] Constructs were incubated with MMP7, 9 and 10. Cleavage for each construct was analysed by SDS-PAGE and confirmed by HEK-Blue IL-2 bioassay.

[0886] The HEK-Blue assay was carried out as follows:

[0887] Conditions: Cell plate: 96 well plate. Cell density: 50K cls/well. Time point for HEK Blue detection were tested: 1 h. Construct number: Total 14 constructs that were tested.

[0888] Assay Flowchart is shown in FIG. 70.

[0889] The results are shown in the table below, where a ‘X’ indicates not fully cleaved and a indicates Cleavage:

| ID | MMP | Cleavage |
|---|---|---|
| AK904 | 7 | X |
| | 9 | X |
| | 10 | X |
| AK910 | 7 | X |
| | 9 | X |
| | 10 | X |
| AK932 | 7 | √ |
| | 9 | — |
| | 10 | — |
| AK938 | 7 | √ |
| | 9 | — |
| | 10 | — |
| AK930 | 7 (36 hr) | √ |
| | 9 | — |
| | 10 | — |
| AK936 | 7 | √ |
| | 9 | — |
| | 10 | — |

[0890] The specific EC₅₀ readout results from the HEK-Blue IL-2 bioassay are shown in the table below.

| ID | MMP | EC50 (pM) | Max |
|---|---|---|---|
| AK904 (1:1:2) | — | 14.78 | 1.44 |
| | 7 | 17.08 | 1.37 |
| | 9 | 16.00 | 1.43 |
| | 10 | 22.93 | 1.45 |
| AK910 (1:1:2) | — | 1219.34 | 1.31 |
| | 7 | 284.17 | 1.42 |
| | 9 | 519.09 | 1.40 |
| | 10 | 490.52 | 1.40 |
| AK932 (1:1:2) | — | 2403.11 | 1.22 |
| | 7 | 9.30 | 1.43 |
| | 9 | — | — |
| | 10 | — | — |
| AK938 (1:1:2) | — | 885.13 | 1.31 |
| | 7 | 18.03 | 1.38 |
| | 9 | — | — |
| | 10 | — | — |
| AK930 (1:1:2) | — | 1858.76 | 1.22 |
| | 7 | 8.00 | 1.41 |
| | 9 | — | — |
| | 10 | — | — |
| AK936 (1:1:2) | — | 785.85 | 1.37 |
| | 7 | 16.11 | 1.40 |
| | 9 | — | — |
| | 10 | — | — |

[0891] The SDS-PAGE gel results are shown in FIGS. 44A-D. The HEK-Blue IL-2 bioassay results are shown in FIGS. 45A-F.

### Example 9

[0892] This example demonstrates the masking and cleavage of exemplary IL-12 constructs.

[0893] The following used in this example are shown in FIG. 71.

[0894] AK671 is an unmasked molecule, AK663 does not comprise a cytokine, and AK664 is non-cleavable. These three molecules serve as controls.

[0895] The cleavage peptide for each construct is show at the top of each column.

[0896] AK066, AK667, AK918, AK920 and AK069 are ‘version 1’ constructs. AK605, AK668, AK919, AK921, AK670 are ‘version 2’ constructs. AK924, AK922, AK925 and AK923 are ‘version 3’ constructs.

[0897] The cleavable linker (protease site linker). i.e. between the HL2 and the IL-12 domain, and the non-cleavable linker (b2 receptor linker) between HL11 and the masking moiety for each version is shown below:

| v1 | Protease site linker | | b2 receptor linker |
|---|---|---|---|
| V1 | GGSGGSXXXXXXSGP | V1 | PGGSGP |
| V2 | GGSGGSGGSXXXXXXSGP | V2 | GGSPG |
| | | V3 | GGSGGGSG |

[0898] Where applicable, all of these constructs comprise a KDNTEGRV mutation to the GAG binding domain of the IL-12p40 subunit, a C252S mutation of the IL-12p40 subunit, and a C242S mutation of the IL-12RB2 domain. Sequences for each construct are shown in the table below:

| | |
|---|---|
| AK671 | 1^{st} polypeptide chain |
| | DKTHTCPPCPAPELLGGPSVFLFPPKPKDTLMISRTPEVTCVVVDVSHEDPEVKFNW |
| | YVDGVEVHNAKTKPREEQYASTYRVVSVLTVLHQDWLNGKEYKCKVSNKALPARIEK |
| | TISKAKGQPREPQVCTLPPSRDELTKNQVSLSCAVKGFYPSDIAVEWESNGQPENNY |
| | KTTPPVLDSDGSFFLVSKLTVDKSRWQOOGNVFSCSVMHEALHNHYTQKSLSLSPGK |
| | 2^{nd} polypeptide chain |
| | DKTHTCPPCPAPELLGGPSVFLFPPKPKDTLMISRTPEVTCVVVDVSHEDPEVKFNW |
| | YVDGVEVHNAKTKPREEQYASTYRVVSVLTVLHQDWLNGKEYKCKVSNKALPAPIEK |
| | TISKAKGQPREPQVYTLPPCRDELTKNQVSLWCLVKGFYPSDIAVEWESNGQPENNY |
| | KTTPPVLDSDGSFFLYSKLTVDKSRWQQGNVFSCSVMHEALHNHYTQKSLSLSPGGG |
| | SGGSGGSGGSGGSSGPIWELKKDVYVVELDWYPDAPGEMVVLTCDTPEEDGITWTLD |
| | QSSEVLGSGKTLTIQVKEFGDAGQYTCHKGGEVLSHSLLLLHKKEDGIWSTDILKDQ |
| | KEPKNKTFLRCEAKNYSGRFTCWWLTTISTDLTFSVKSSRGSSDPQGVTCGAATLSA |
| | ERVRGDNKEYEYSVECQEDSACPAAEESLPIEVMVDAVHKLKYENYTSSFFIRDIIK |
| | PDPPKNLQLKPLKNSRQVEVSWEYPDTWSTPHSYFSLTFSVQVQGKDNTEGRVFTDK |
| | TSATVICRKNASISVRAQDRYYSSSWSEWASVPCSGGGGSGGGGSGGGGSRNLPVAT |
| | PDPGMFPCLHHSQNLLRAVSNMLQKARQTLEFYPCTSEEIDHEDITKDKTSTVEACL |
| | PLELTKNESCLNSRETSFITNGSCLASRKTSFMMALCLSSIYEDLKMYQVEFKTMNA |
| | KLLMDPKRQIFLDQNMLAVIDELMQALNFNSETVPQKSSLEEPDFYKTKIKLCILLH |
| | AFRIRAVTIDRVMSYLNAS |
| AK663 | 1^{st} polypeptide chain |
| | DKTHTCPPCPAPELLGGPSVELEPPKPKDTLMISRTPEVTCVVVDVSHEDPEVKFNW |
| | YVDGVEVHNAKTKPREEQYASTYRVVSVLTVLHQDWLNGKEYKCKVSNKALPAPIEK |
| | TISKAKGQPREPQVCTLPPSRDELTKNQVSLSCAVKGFYPSDIAVEWESNGQPENNY |
| | KTTPPVLDSDGSFFLVSKLTVDKSRWQQGNVFSCSVMHEALHNHYTQKSLSLSPGGG |
| | SPGKIDACKRGDVTVKPSHVILLGSTVNITCSLKPRQGCFHYSRRNKLILYKFDRRI |
| | NFHHGHSLNSQVTGLPLGTTLFVCKLACINSDEIQICGAEIFVGVAPEQPQNLSCIQ |
| | KGEQGTVACTWERGRDTHLYTEYTLQLSGPKNLTWQKQCKDIYCDYLDFGINLTPES |
| | PESNFTAKVTAVNSLGSSSSLPSTFTFLDIVRPLPPWDIRIKFQKASVSRSTLYWRD |
| | EGLVLLNRLRYRPSNSRLWNMVNVTKAKGRHDLLDLKPFTEYEFQISSKLHLYKGSW |
| | SDWSESLRAQTPEE |
| | 2^{nd} polypeptide chain |
| | DKTHTCPPCPAPELLGGPSVFLFPPKPKDTLMISRTPEVTCVVVDVSHEDPEVKFNW |
| | YVDGVEVHNAKTKPREEQYASTYRVVSVLTVLHQDWLNGKEYKCKVSNKALPAPIEK |
| | TISKAKGQPREPQVYTLPPCRDELTKNQVSLWCLRGFYPSDIAVEWESNGQPENNYK |
| | TTPPVLDSDGSFFLYSKLTVDKSRWOQGNVFSCSVMBEALHNHYTQKSLSLSPGK |
| AK664 | 1^{st} polypeptide chain |
| | DKTHTCPPCPAFELLGGPSVFLFPPKPKDTLMISRTPEVTCVVVDVSHEDPEVKFNW |
| | YVDGVEVHNAKTKPREEQYASTYRVVSVLTVLHQDWLNGKEYKCKVSNKALPAPIEK |
| | TISKAKGQPREPQVCTLPPSRDELTKNQVSLSCAVKGFYPSDIAVEWESNGQPENNY |
| | KTTPPVLDSDGSFFLVSKLTVDKSRWQQGNVFSCSVMHEALHNHYTQKSLSLSPGGG |
| | SPGKIDACKRGDVTVKPSHVILLGSTVNITCSLKPRQGCFHYSRRNKLILYKFDRRI |
| | NFHHGHSLNSQVTGLPLGTTLFVCKLACINSDEIQICGAEIFVGVAPEQPQNLSCIQ |
| | KGEQGTVACTWERGRDTHLYTEYTLQLSGPKNLTWQKQCKDIYCDYLDFGINLTPES |
| | PESNFTAKVTAVNSLGSSSSLPSTFTFLDIVRPLPPWDIRIKFQKASVSFSTLYWRD |
| | EGLVLLNRLRYRPSNSRLWNMVNVTKAKGRHDLLDLKPFTEYEFQISSKHLYKGSWS |
| | DWSESLRAQTPEE |
| | 2^{nd} polypeptide chain |
| | DKTHTCPPCPAPELLGGPSVFLFPPKPKDTLMISRTPEVTCVVVDVSHEDPEVKFNW |
| | YVDGVEVHNAKTKPREEQYASTYRVVSVLTVLHQDWLNGKEYKCKVSNKALPAPIEK |
| | TISKAKGQPREPQVYTLPPCRDELTKNQVSLWCLVKGFYPSDIAVEWESNGQPENNY |
| | KTTPPVLDSDGSFFLYSKLTVDKSRWQQGNVFSCSVMHEALHNHYTQKSLSLSPGGG |
| | SGGSGGSGGSGGSSGPIWELKKDVYVVELDWYPDAPGEMVVLTCDTPEEDGITWTLD |
| | QSSEVLGSGKTLTIQVKEFGDAGQYTCHKGGEVLSHSLLLLHKKEDGIWSTDILKDQ |
| | KEPKNKTFLRCEAKNYSGRFTCWWLTTISTDLTFSVKSSRGSSDPQGVTCGAATLSA |
| | ERVRGDNKEYEYSVECQEDSACPAAEESLPIEVMVDAVHKLKYENYTSSFFIRDIIK |
| | PDPPKNLQLKPLKNSRQVEVSWEYPDTWSTPHSYFSLTFSVQVQGKDNTEGRVFTDK |
| | TSATVICRKNASISVRAQDRYYSSSWSEWASVPCSGGGGSGGGGSGGGGSRNLPVAT |
| | PDPGMFPCLHHSQNLLRAVSNMLQKARQTLEFYPCTSEEIDHEDITKDKTSTVEACL |
| | PLELTKNESCLNSRETSFITNGSCLASRKTSFMMALCLSSIYEDLKMYQVEFKTMNA |
| | KLLMDPRRQIPLDQNMLAVIDELMQALNFNSETVPQKSSLEEPDFYKTKIKLCILLH |
| | AFRIRAVTIDRVNSYLNAS |
| AK665 | 1^{st} polypeptide chain |
| | DKTHTCPPCPAPELLGGPSVFLFPPKPKDTLMISRTPEVTCVVVDVSHEDPEVKFNW |
| | YVDGVEVHNAKTKPREEQYASTYRVVSVLTVLHQDWLNGKEYKCKVSNKALPAPIEK |
| | TISKAKGQPREPQVCTLPPSRDELTKNQVSLSCAVKGFYPSDIAVEWESNGQPENNY |
| | KTTPPVLDSDGSFFLVSKLTVDKSRWQQGNVFSCSVMHEALHNHYTQKSLSLSPGGG |
| | SPGKIDACKRGDVTVKPSHVILLGSTVNITCSLKPRQGCFHYSRRNKLILYKFDRRI |
| | NFHHGHSLNSQVTGLPLGTTLFVCKLACINSDEIQICGAEIFVGVAPEQPQNLSCIQ |
| | KGEQGTVACTWERGRDTHLYTEYTLQLSGPKNLTWQKQCKDIYCDYLDFGINLTPES |
| | PESNFTAKVTAVNSLGSSSSLPSTFTFLDIVRPLPPWDIRIKFQKASVSRSTLYWRD |
| | EGLVLLNRLRYRPSNSRLWNMVNVTKAKGRHDLLDLKPFTEYEFQISSKLHLYKGSW |
| | SDWSESLRAQTPEE |
| | 2^{nd} polypeptide chain |
| | DKTHTCPPCPAPELLGGPSVFLFPPKPKDTLMISRTPEVTCVVVDVSHEDPEVKFNW |
| | YVDGVEVHNAKTKPREEQYASTYRVVSVLTVLHQDWLNGKEYKCKVSNKALPAPIEK |
| | TISKAKGQPREPQVYTLPPCRDELTKNQVSLWCLVKGFYPSDIAVEWESNGQPENNY |
| | KTTPPVLDSDGSFFLYSKLTVDKSRWQQGNVFSCSVMHEALHNHYTQKSLSLSPGGG |
| | SGGSGGSVPLSLYSGPIWELKKDVYVVELDWYPDAPGEMVVLTCDTPEEDGITWTLD |
| | QSSEVLGSGKTLTIQVKEFGDAGQYTCHKGGEVLSHSLLLLHKKEDGIWSTDILKDQ |
| | KEPKNKTFLRCEAKNYSGRFTCWWLTTISTDLTFSVKSSRGSSDPQGVTCGAATLSA |
| | ERVRGDNKEYEYSVECQEDSACPAAEESLPIEVMVDAVHKLKYENYTSSFFIRDIIK |
| | PDPPKNLQLKPLKNSRQVEVSWEYPDTWSTPHSYFSLTFSVQVQGKDNTEGRVFTDK |
| | TSATVICRKNASISVRAQDRYYSSSWSEWASVPCSGGGGSGGGGSGGGGSRNLPVAT |
| | PDPGMFPCLHHSQNLLRAVSNMLQKARQTLEFYPCTSEEIDHEDITKDKTSTVEACL |
| | PLELTKNESCLNSRETSFITNGSCLASRKTSFMMALCLSSIYEDLEMYQVEFKTMNA |
| | KLLMDPERQIFLDQNMLAVIDELMQALNFNSETVPQKSSLEEPDFYKTKIKLCILLH |
| | AFRIRAVTIDRVMSYLNAS |
| AK666 | 1^{st} polypeptide chain |
| | DKTHTCPPCPAPELLGGPSVFLFPPKPKDTLMISRTPEVTCVVVDVSHEDPEVKFNW |
| | YVDGVEVHNAKTKPREEQYASTYRVVSVLTVLHQDWLNGKEYKCKVSNKALPAPIEK |
| | TISKAKGQPREPQVCTLPPSRDELTKNQVSLSCAVKGFYPSDIAVEWESNGQPENNY |
| | KTTPPVLDSDGSFFLVSKLTVDKSRWQQGNVFSCSVMHEALHNHYTQKSLSLSPGPG |
| | GSGPKIDACKRGDVTVKPSHVILLGSTVNITCSLKPRQGCFHYSRRNKLILYKFDRR |
| | INFHHGHSLNSQVTGLPLGTTLFVCKLACINSDEIQICGAEIFVGVAPEQPQNLSCI |
| | QKGEQGTVACTWERGRDTHLYTEYTLQLSGPKNLTWQKQCKDIYCDYLDFGINLTPE |
| | SPESNFTAKVTAVNSLGSSSSLPSTFTFLDIVRPLPPWDIRIKFQKASVSRSTLYWR |
| | DEGLVLLNRLRYRPSNSRLNNMVNVTKAKGRHDLLDLKPFTEYEFQISSKLHLYKGS |
| | WSDWSESLRAQTPEE |
| | 2^{nd} polypeptide chain |
| | DKTHTCPPCPAPELLGGPSVFLFPPKPKDTLMISRTPEVTCVVVDVSHEDPEVKFNW |
| | YVDGVEVHNAKTKPREEQYASTYRVVSVLTVLHQDWLNGKEYKCKVSNKALPAPIEK |
| | TISKAKGQPREPQVYTLPPCRDELTKNQVSLWCLVKGFYPSDIAVEWESNGQPENNY |
| | KTTPPVLDSDGSFFLYSKLTVDKSRWQQGNVFSCSVMHEALHNHYTQKSLSLSPGGG |
| | SGGSVPLSLYSGPIWELKKDVYVVELDWYPDAPGEMVVLTCDTPEEDGITWTLDQSS |
| | EVLGSGKTLTIQVKEFGDAGQYTCHKGGEVLSHSLLLLHKKEDGIWSTDILKDQKEP |
| | KNKTFLRCEAKNYSGRFTCWWLTTISTDLTFSVKSSRGSSDPQGVTCGAATLSAERV |
| | RGDNKEYEYSVECQEDSACPAAEESLPIEVMVDAVHKLKYENYTSSFFIRDIIKPDP |
| | PKNLQLKPLKNSRQVEVSWEYPDTWSTPHSYFSLTFSVQVQGKDNTEGRVFTDKTSA |
| | TVICRKNASISVRAQDRYYSSSWSEWASVPCSGGGGSGGGGSGGGGSRNLPVATPDP |
| | GMFPCLHHSQNLLRAVSNMLQKARQTLEFYPCTSEEIDHEDITKDKTSTVEACLPLE |
| | LTKNESCLNSRETSFITNGSCLASRKTSFMMALCLSSIYEDLKMYQVEFKTMNAKLL |
| | MDPKRQIFLDQNMLAVIDELMQALNFNSETVPQKSSLEEPDFYKTKIKLCILLHAFR |
| | IRAVTIDRVMSYLNAS |
| AK667 | 1^{st} polypeptide chain |
| | DKTHTCPPCPAPELLGGPSVFLFPPKPKDTLMISRTPEVTCVVVDVSHEDPEVKFNW |
| | YVDGVEVHNAKTKPREEQYASTYRVVSVLTVLHQDWLNGKEYKCKVSNKALPAPIEK |
| | TISKAKGQPREPQVCTLPPSRDELTKNQVSLSCAVKGFYPSDIAVEWESNGQPENNY |
| | KTTPPVLDSDGSFFLVSKLTVDKSRWQQGNVFSCSVMHEALHNHYTQKSLSLSPGPG |
| | GSGPKIDACKRGDVTVKPSHVILLGSTVNITCSLKPRQGCFHYSRRNKLILYKFDRR |
| | INFHHGHSLNSQVTGLPLGTTLFVCKLACINSDEIQICGAEIFVGVAPEQPQNLSCI |
| | QKGEQGTVACTWERGRDTHLYTEYTLQLSGPKNLTWQKQCKDIYCDYLDFGINLTPE |
| | SPESNFTAKVTAVNSLGSSSSLPSTFTFLDIVRPLPPWDIRIKFQKASVSRSTLYWR |
| | DEGLVLLNRLRYRPSNSRLWNMVNVTKAKGRHDLLDLKPFTEYEFQISSKLHLYKGS |
| | WSDWSESLRAQTPEE |
| | 2^{nd} polypeptide chain |
| | DKTHTCPPCPAPELLGGPSVFLFPPKPKDTLMISRTPEVTCVVVDVSHEDPEVKFNW |
| | YVDGVEVHNAKTKPREEQYASTYRVVSVLTVLHQDWLNGKEYKCKVSNKALPAPIEK |
| | TISKAKGQPREPQVYTLPPCRDELTKNQVSLWCLVKGFYPSDIAVEWESNGQPENNY |
| | KTTPPVLDSDGSFFLYSKLTVDKSRWQQGNVFSCSVMHEALHNHYTQKSLSLSPGGG |
| | SGGSMPYDLYHPSGPIWELKKDVYVVELDWYPDAPGEMVVLTCDTPEEDGITWTLDQ |
| | SSEVLGSGKTLTIQVKEFGDAGQYTCHKGGEVLSHSLLLLHKKEDGIWSTDILKDQK |
| | EPKNKTFLRCEAKNYSGRFTCWWLTTISTDLTFSVKSSRGSSDPQGVTCGAATLSAE |
| | RVRGDNKEYEYSVECQEDSACPAAEESLPIEVMVDAVHKLKYENYTSSFFIRDIIKP |
| | DPPKNLQLKPLKNSRQVEVSWEYPDTWSTPHSYFSLTFSVQVQGKDNTEGRVFTDKT |
| | SATVICRKNASISVRAQDRYYSSSWSEWASVPCSGGGGSGGGGSGGGGSRNLPVATP |
| | DPGMFPCLHHSQNLLRAVSNMLQKARQTLEFYPCTSEEIDHEDITKDKTSTVEACLP |
| | LELTKNESCLNSRETSFITNGSCLASRKTSFMMALCLSSIYEDLKMYQVEFKTMNAK |
| | LLMDPKRQIFLDQNMLAVIDELMQALNFNSETVPQKSSLEEPDFYKTKIKLCILLHA |
| | FRIRAVTIDRVMSYLNAS |
| AK668 | 1^{st} polypeptide cnain |
| | DKTHTCPPCPAPELLGGPSVFLFPPKPKDTLMISRTPEVTCVVVDVSHEDPEVKFNW |
| | YVDGVEVHNAKTKPREEQYASTYRVVSVLTVLHQDWLNGKEYKCKVSNKALPAPIEK |
| | TISKAKGQPREPQVCTLPPSRDELTKNQVSLSCAVKGFYPSDIAVEWESNGQPENNY |
| | KTTPPVLDSDGSFFLVSKLTVDKSRWQQGNVFSCSVMHEALHNHYTQKSLSLSPGGG |
| | SPGKIDACKRGDVTVKPSHVILLGSTVNITCSLKPRQGCFHYSRRNKLILYKFDRRI |
| | NFHHGHSLNSQVTGLPLGTTLFVCKLACINSDEIQICGAEIFVGVAPEQPQNLSCIQ |
| | KGEQGTVACTWERGRDTHLYTEYTLQLSGPKNLTWQKQCKDIYCDYLDFGINLTPES |
| | PESNFTAKVTAVNSLGSSSSLPSTFTFLDIVRPLPPWDIRIKFQKASVSRSTLYWRD |
| | EGLVLLNRLRYRPSNSRLWNMVNVTKAKGRHDLLDLKPFTEYEFQISSKLHLYKGSW |
| | SDWSESLRAQTPEE |
| | 2^{nd} polypeptide chain |
| | DKTHTCPPCPAPELLGGPSVFLFPPKPKDTLMISRTPEVTCVVVDVSHEDPEVKFNW |
| | YVDGVEVHNAKTKPREEQYASTYRVVSVLTVLHQDWLNGKEYKCKVSNKALPAPIEK |
| | TISKAKGQPREPQVYTLPPCRDELTKNQVSLWCLVKGFYPSDIAVEWESNGQPENNY |
| | KTTPPVLDSDGSFFLYSKLTVDKSRWQQGNVFSCSVMHEALHNHYTQKSLSLSPGGG |
| | SGGSGGSMPYDLYHPSGPIWELKKDVYVVELDWYPDAPGEMVVLTCDTPEEDGITWT |
| | LDQSSEVLGSGKTLTIQVKEFGDAGQYTCHKGGEVLSHSLLLLHKKEDGIWSTDILK |
| | DQKEPKNKTFLRCEAKNYSGRFTCWWLTTISTDLTFSVKSSRGSSDPQGVTCGAATL |
| | SAERVRGDNKEYEYSVECQEDSACPAAEESLPIEVMVDAVHKLKYENYTSSFFIRDI |
| | IKPDPPKNLQLKPLKNSRQVEVSWEYPDTWSTPHSYFSLTFSVQVQGKDNTEGRVFT |
| | DKTSATVICRKNASISVRAQDRYYSSSWSEWASVPCSGGGGSGGGGSGGGGSRNLPV |
| | ATPDPGMFPCLHHSQNLLRAVSNMLQKARQTLEFYPCTSEEIDHEDITKDKTSTVEA |
| | CLPLELTKNESCLNSRETSFITNGSCLASRKTSFMMALCLSSIYEDLKMYQVEFKTM |
| | NAKLLMDPKRQIPLDQNMLAVIDELMQALNFNSETVPQKSSLEEPDFYKTKIKLCIL |
| | LHAFRIRAVTIDRVMSYLNAS |
| AK918 | 1^{st} polypeptide chain |
| | DKTHTCPPCPAPELLGGPSVFLFPPKPKDTLMISRTPEVTCVVVDVSHEDPEVKFNW |
| | YVDGVEVHNAKTKPREEQYASTYRVVSVLTVLHQDWLNGKEYKCKVSNKALPAPIEK |
| | TISKAKGQPREPQVCTLPPSRDELTKNQVSLSCAVKGFYPSDIAVEWESNGQPENNY |
| | KTTPPVLDSDGSFFLVSKLTVDKSRWQQGNVFSCSVMHEALHNHYTQKSLSLSPGPG |
| | GSGPKIDACKRGDVTVKPSHVILLGSTVNITCSLKPRQGCFHYSRRNKLILYKFDRR |
| | INFHHGHSLNSQVTGLPLGTTLFVCKLACINSDEIQICGAEIFVGVAPEQPQNLSCI |
| | QKGEQGTVACTWERGRDTHLYTEYTLQLSGPKNLTWQKQCKDIYCDYLDFGINLTPE |
| | SPESNFTAKVTAVNSLGSSSSLPSTFTFLDIVRPLPPWDIRIKFQKASVSRSTLYWR |
| | DEGLVLLNRLRYRPSNSRLWNMVNVTKAKGRHDLLDLKPFTEYEFQISSKLHLYKGS |
| | WSDWSESLRAQTPEE |
| | 2^{nd} polypeptide chain |
| | DKTHTCFPCPAPELLGGPSVFLFPPKPKDTLMISRTPEVTCVWDVSHEDPEVKFNWY |
| | VDGVEVHNAKTKPREEQYASTYRVVSVLTVLHQDWLNGKEYKCKVSNKALPAPIEKT |
| | ISKAKGQPREPQVYTLPPCRDELTKNQVSLWCLVKGFYPSDIAVEWESNGQPENNYK |
| | TTPPVLDSDGSFFLYSKLTVDKSRWQQGNVFSCSVMHEALHNHYTQKSLSLSPGGGS |
| | GGSDSGGFMLTSGPIWELKKDVYVVELDWYPDAPGEWVLTCDTPEEDGITWTLDQSS |
| | EVLGSGKTLTIQVKEFGDAGQYTCHKGGEVLSHSLLLLHKKEDGIWSTDILKDQKEP |
| | KNKTFLRCEAKNYSGRFTCWWLTTISTDLTFSVKSSRGSSDPQGVTCGAATLSAERV |
| | RGDNKEYEYSVECQEDSACPAAEESLPIEVMVDAVHKLKYENYTSSFFIRDIIKPDP |
| | PKNLQLKPLKNSRQVEVSWEYPDTWSTPHSYFSLTFSVQVQGKDNTEGRVFTDKTSA |
| | TVICRKNASISVRAQDRYYSSSWSEWASVPCSGGGGSGGGGSGGGGSRNLPVATPDP |
| | GMFPCLHHSQNLLRAVSNMLQKARQTLEFYPCTSEEIDHEDITKDKTSTVEACLPLE |
| | LTKNESCLNSRETSFITNGSCLASRKTSFMMALCLSSIYEDLKMYQVEFKTMNAKLL |
| | MDPKRQIFLDQNMLAVIDELMQALNFNSETVPQKSSLEEPDFYKTKIKLCILLHAFR |
| | IRAVTIDRVMSYLNAS |
| AK919 | 1^{st} polypeptide chain |
| | DKTHTCPPCPAPELLGGPSVFLFPPKPKDTLMISRTPEVTCWVDVSHEDPEVKFNWY |
| | VDGVEVHNAKTKPREEQYASTYRVVSVLTVLHQDWLNGKEYKCKVSNKALPAPIEKT |
| | ISKAKGQPREPQVCTLPPSRDELTKNQVSLSCAVKGFYPSDIAVEWESNGQPENNYK |
| | TTPPVLDSDGSFFLVSKLTVDKSRWQQGNVFSCSVMHEALHNHYTQKSLSLSPGGGS |
| | PGKIDACKRGDVTVKPSHVILLGSTVNITCSLKPRQGCFHYSRRNKLILYKFDRRIN |
| | FHHGHSLNSQVTGLPLGTTLFVCKLACINSDEIQICGAEIFVGVAPEQPQNLSCIQK |
| | GEQGTVACTWERGRDTHLYTEYTLQLSGPKNLTWQKQCKDIYCDYLDFGINLTPESP |
| | ESNFTAKVTAVNSLGSSSSLPSTFTFLDIVRPLPPWDIRIKFQKASVSRSTLYWRDE |
| | GLVLLNRLRYRPSNSRLWNMVNVTKAKGRHDLLDLKPFTEYEFQISSKLHLYKGSWS |
| | DWSESLRAQTPEE |
| | 2^{nd} polypeptide chain |
| | DKTHTCPPCPAPELLGGPSVFLFPPKPKDTLMISRTPEVTCVVVDVSHEDPEVKFNW |
| | YVDGVEVHNAKTKPREEQYASTYRVVSVLTVLHQDWLNGKEYKCKVSNKALPAPIEK |
| | TISKAKGQPREPQVYTLPPCRDELTKNQVSLWCLVKGFYPSDIAVEWESNGQPENNY |
| | KTTPPVLDSDGSFFLYSKLTVDKSRWQQGNVFSCSVMHEALHNHYTQKSLSLSPGGG |
| | SGGSGGSDSGGFMLTSGPIWELKKDVYVVELDWYPDAPGEMVVLTCDTPEEDGITWT |
| | LDQSSEVLGSGKTLTIQVKEFGDAGQYTCHKGGEVLSHSLLLLHKKEDGIWSTDILK |
| | DQKEPKNKTFLRCEAKNYSGRFTCWWLTTISTDLTFSVKSSRGSSDPQGVTCGAATL |
| | SAERVRGDNKEYEYSVECQEDSACPAAEESLPIEVMVDAVHKLKYENYTSSFFIRDI |
| | IKPDPPKNLQLKPLKNSRQVEVSWEYPDTWSTPHSYFSLTFSVQVQGKDNTEGRVFT |
| | DKTSATVICRKNASISVRAQDRYYSSSWSEWASVPCSGGGGSGGGGSGGGGSRNLPV |
| | ATPDPGMFPCLHHSQNLLRAVSNMLQKARQTLEFYPCTSEEIDHEDITKDKTSTVEA |
| | CLPLELTKNESCLNSRETSFITNGSCLASRKTSFMMALCLSSIYEDLKMYQVEFKTM |
| | NAKLLMDPKRQIFLDQNMLAVIDELMQALNFNSETVPQKSSLEEPDFYKTKIKLCIL |
| | LHAFRIRAVTIDRVMSYLNAS |
| AK920 | 1^{st} polypeptide chain |
| | DETHTCPPCPAPELLGGPSVFLFPPKPKDTLMISRTPEVTCVVVDVSHEDPEVKFNW |
| | YVDGVEVHNAKTKPREEQYASTYRVVSVLTVLHQDWLNGKEYKCKVSNKALPAPIEK |
| | TISKAKGQPREPQVCTLPPSRDELTKNQVSLSCAVKGFYPSDIAVEWESNGQPENNY |
| | KTTPPVLDSDGSFFLVSKLTVDKSRWQQGNVFSCSVMHEALHNHYTQKSLSLSPGPG |
| | GSGPKIDACKRGDVTVKPSHVILLGSTVNITCSLKPRQGCFHYSRRNKLILYKFDRR |
| | INFHHGHSLNSQVTGLPLGTTLFVCKLACINSDEIQICGAEIFVGVAPEQPQNLSCI |
| | QKGEQGTVACTWERGRDTHLYTEYTLQLSGPKNLTWQKQCKDIYCDYLDFGINLTPE |
| | SPESNFTAKVTAVNSLGSSSSLPSTETFLDIVRPLPPWDIRIKFQKASVSRSTLYWR |
| | DEGLVLLNRLRYRPSNSRLWNMVNVTKAKGRHDLLDLKPFTEYEFQISSKLHLYKGS |
| | WSDWSESLRAQTPEE |
| | 2^{nd} polypeptide chain |
| | DKTHTCPPCPAPELLGGPSVFLFPPKPKDTLMISRTPEVTCVVVDVSHEDPEVKFNW |
| | YVDGVEVHNAKTKPREEQYASTYRVVSVLTVLHQDWLNGKEYKCKVSNKALPAPIEK |
| | TISKAKGQPREPQVYTLPPCRDELTKNQVSLWCLVKGFYPSDIAVEWESNGQPENNY |
| | KTTPPVLDSDGSFFLYSKLTVDKSRWQQGNVFSCSVMHEALHNHYTQKSLSLSPGGG |
| | SGGSRAAAVKSPSGPIWELKKDVYVVELDWYPDAPGEMVVLTCDTPEEDGITWTLDQ |
| | SSEVLGSGKTLTIQVKEFGDAGQYTCHKGGEVLSHSLLLLHKKEDGIWSTDILKDQK |
| | EPKNKTFLRCEAKNYSGRFTCWWLTTISTDLTFSVKSSRGSSDPQGVTCGAATLSAE |
| | RVRGDNKEYEYSVECQEDSACPAAEESLPIEVMVDAVHKLKYENYTSSFFIRDIIKP |
| | DPPKNLQLKPLKNSRQVEVSWEYPDTWSTPHSYFSLTFSVQVQGKDNTEGRVFTDKT |
| | SATVICRKNASISVRAQDRYYSSSWSEWASVPCSGGGGSGGGGSGGGGSRNLPVATP |
| | DPGMFPCLHHSQNLLRAVSNMLQKARQTLEFYPCTSEEIDHEDITKDKTSTVEACLP |
| | LELTKNESCLNSRETSFITNGSCLASRKTSFMMALCLSSIYEDLKMYQVEFKTMNAK |
| | LLMDPKRQIELDQNMLAVIDELMQALNFNSETVPQKSSLEEPDFYKTKIKLCILLHA |
| | FRIRAVTIDRVMSYLNAS |
| AK921 | 1^{st} polypeptide chain |
| | DKTHTCPPCPAPELLGGPSVFLFPPKPKDTLMISRTPEVTCVVVDVSHEDPEVKFNW |
| | YVDGVEVHNAKTKPREEQYASTYRVVSVLTVLHQDWLNGKEYKCKVSNKALPAPIEK |
| | TISKAKGQPREPQVCTLPPSRDELTKNQVSLSCAVKGFYPSDIAVEWESNGQPENNY |
| | KTTPPVLDSDGSFFLVSKLTVDKSRWQQGNVFSCSVMHEALHNHYTQKSLSLSPGGG |
| | SPGKIDACKRGDVTVKPSHVILLGSTVNITCSLKPRQGCFHYSRRNKLILYKFDRRI |
| | NFHHGHSLNSQVTGLPLGTTLFVCKLACINSDEIQICGAEIFVGVAPEQPQNLSCIQ |
| | KGEQGTVACTWERGRDTHLYTEYTLQLSGPKNLTWQKQCKDIYCDYLDFGINLTPES |
| | PESNFTAKVTAVNSLGSSSSLPSTFTFLDIVRPLPPWDIRIKFQKASVSRSTLYWRD |
| | EGLVLLNRLRYRPSNSRLWNMVNVTKAKGRHDLLDLKPFTEYEFQISSKLHLYKGSW |
| | SDWSESLRAQTPEE |
| | 2^{nd} polypeptide chain |
| | DKTHTCPPCPAPELLGGPSVFLFPPKPKDTLMISRTPEVTCVVVDVSHEDPEVKFNW |
| | YVDGVEVHNAKTKPREEQYASTYRVVSVLTVLHQDWLNGKEYKCKVSNKALPAPIEK |
| | TISKAKGQPREPQVYTLPPCRDELTKNQVSLWCLVKGFYPSDIAVEWESNGQPENNY |
| | KTTPPVLDSDGSFFLYSKLTVDKSRWQQGNVFSCSVMHEALHNHYTQKSLSLSPGGG |
| | SGGSGGSRAAAVKSPSGPIWELKKDVYVVELDWYPDAPGEMVVLTCDTPEEDGITWT |
| | LDQSSEVLGSGKTLTIQVKEFGDAGQYTCHKGGEVLSHSLLLLHKKEDGIWSTDILK |
| | DQKEPKNKTFLRCEAKNYSGRFTCWWLTTISTDLTFSVKSSRGSSDPQGVTCGAATL |
| | SAERVRGDNKEYEYSVECQEDSACPAAEESLPIEVMVDAVHKLKYENYTSSFFIRDI |
| | IKPDPPKNLQLKPLKNSRQVEVSWEYPDTWSTPHSYFSLTFSVQVQGKDNTEGRVFT |
| | DKTSATVICRKNASISVRAQDRYYSSSWSEWASVPCSGGGGSGGGGSGGGGSRNLPV |
| | ATPDPGMFPCLHHSQNLLRAVSNMLQKARQTLEFYPCTSEEIDHEDITKDKTSTVEA |
| | CLPLELTKNESCLNSRETSFITNGSCLASRKTSFMMALCLSSIYEDLKMYQVEFKTM |
| | NAKLLMDPKRQIFLDQNMLAVIDELMQALNFNSETVPQKSSLEEPDFYKTKIKLCIL |
| | LHAFRIRAVTIDRVMSYLNAS |
| AK922 | 1^{st} polypeptide chain |
| | DKTHTCPPCPAPELLGGPSVELEPPKPKDTLMISRTPEVTCVVVDVSHEDPEVKFNW |
| | YVDGVEVHNAKTEPREEQYASTYRVVSVLTVLHQDWLNGKEYKCKVSNKALPAPIEK |
| | TISKAKGQPREPQVCTLPPSRDELTKNQVSLSCAVKGFYPSDIAVEWESNGQPENNY |
| | KTTPPVLDSDGSFFLVSKLTVDKSRWQQGNVFSCSVMHEALHNHYTQKSLSLSPGGG |
| | SGGGSGKIDACKRGDVTVKPSHVILLGSTVNITCSLKPRQGCFHYSRRNKLILYKFD |
| | RRINFHHGHSLNSQVTGLPLGTTLFVCKLACINSDEIQICGAEIFVGVAPEQPQNLS |
| | CIQKGEQGTVACTWERGRDTHLYTEYTLQLSGPKNLTWQKQCKDIYCDYLDFGINLT |
| | PESPESNFTAKVTAVNSLGSSSSLPSTFTFLDIVRPLPPWDIRIKFQKASVSRSTLY |
| | WRDEGLVLLNRLRYRPSNSRLWNMVNVTKAKGRHDLLDLKPFTEYEFQISSKLHLYK |
| | GSWSDWSESLRAQTPEE |
| | 2^{nd} polypeptide chain |
| | DKTHTCPPCPAPELLGGPSVFLFPPKPKDTLMISRTPEVTCVVVDVSHEDPEVKFNW |
| | YVDGVEVHNAKTEPREEQYASTYRVVSVLTVLHQDWLNGKEYKCKVSNKALPAPIEK |
| | TISKAKGQPREPQVYTLPPCRDELTKNQVSLWCLVKGFYPSDIAVEWESNGQPENNY |
| | KTTPPVLDSDGSFFLYSKLTVDKSRWQQGNVFSCSVMHEALHNHYTQKSLSLSPGGG |
| | SGGSISSGLLSGRSSGPIWELKKDVYVVELDWYPDAPGEMVVLTCDTPEEDGITWTL |
| | DQSSEVLGSGKTLTIQVKEFGDAGQYTCHKGGEVLSHSLLLLHKKEDGIWSTDILKD |
| | QKEPKNKTFLRCEAKNYSGRFTCWWLTTISTDLTFSVKSSRGSSDPQGVTCGAATLS |
| | AERVRGDNKEYEYSVECQEDSACPAAEESLPIEVMVDAVHKLKYENYTSSFFIRDII |
| | KPDPPKNLQLKPLKNSRQVEVSWEYPDTWSTPHSYFSLTFSVQVQGKDNTEGRVFTD |
| | KTSATVICRKNASISVRAQDRYYSSSWSEWASVPCSGGGGSGGGGSGGGGSRNLPVA |
| | TPDPGMFPCLHHSQNLLRAVSNMLQKARQTLEFYPCTSEEIDHEDITKDKTSTVEAC |
| | LPLELTKNESCLNSRETSFITNGSCLASRKTSFMMALCLSSIYEDLKMYQVEFKTMN |
| | AKLLMDPKRQIFLDQNMLAVIDELMQALNFNSETVPQKSSLEEPDFYKTKIKLCILL |
| | HAFRIRAVTIDRVMSYLNAS |
| AK923 | 1^{st} polypeptide chain |
| | DKTHTCPPCFAPELLGGPSVFLFPPKPKDTLMISRTPEVTCVVVDVSHEDPEVKFNW |
| | YVDGVEVHNAKTKPREEQYASTYRVVSVLTVLHQDWLNGKEYKCKVSNKALPAPIEK |
| | TISKAKGQPREPQVCTLPPSRDELTKNQVSLSCAVKGFYPSDIAVEWESNGQPENNY |
| | KTTPPVLDSDGSFFLVSKLTVDKSRWQQGNVFSCSVMHEALHNHYTQKSLSLSPGGG |
| | SGGGSGKIDACKRGDVTVKPSHVILLGSTVNITCSLKPRQGCFHYSRRNKLILYKFD |
| | RRINFHHGHSLNSQVTGLPLGTTLFVCKLACINSDEIQICGAEIFVGVAPEQPQNLS |
| | CIQKGEQGTVACTWERGRDTHLYTEYTLQLSGPKNLTWQKQCKDIYCDYLDFGINLT |
| | PESPESNFTAKVTAVNSLGSSSSLPSTFTFLDIVRPLPPWDIRIKFQKASVSRSTLY |
| | WRDEGLVLLNRLRYRPSNSRLWNMVNVTKAKGRHDLLDLKPFTEYEFQISSKLHLYK |
| | GSWSDWSESLRAQTPEE |
| | 2^{nd} polypeptide chain |
| | DKTHTCPPCPAPELLGGPSVPLFPPKPKDTLMISRTPEVTCVVVDVSHEDPEVKFNW |
| | YVDGVEVHNAKTKPREEQYASTYRVVSVLTVLHQDWLNGKEYKCKVSNKALPAPIEK |
| | TISKAKGQPREPQVYTLPPCRDELTKNQVSLWCLVKGFYPSDIAVEWESNGQPENNY |
| | KTTPPVLDSDGSFFLYSKLTVDKSRWQQGNVFSCSVMHEALHNHYTQKSLSLSPGGG |
| | SGGSGGSISSGLLSGRSSGPIWELKKDVYVVELDWYPDAPGEMVVLTCDTPEEDGIT |
| | WTLDQSSEVLGSGKTLTIQVKEFGDAGQYTCHKGGEVLSHSLLLLHKKEDGIWSTDI |
| | LKDQKEPKNKTFLRCEAKNYSGRFTCWWLTTISTDLTFSVKSSRGSSDPQGVTCGAA |
| | TLSAERVRGDNKEYEYSVECQEDSACPAAEESLPIEVMVDAVHKLKYENYTSSFFIR |
| | DIIKPDPPKNLQLKPLKNSRQVEVSWEYPDTWSTPHSYFSLTFSVQVQGKDNTEGRV |
| | FTDKTSATVICRKNASISVRAQDRYYSSSWSEWASVPCSGGGGSGGGGSGGGGSRNL |
| | PVATPDPGMFPCLHHSQNLLRAVSNMLQKARQTLEFYPCTSEEIDHEDITKDKTSTV |
| | EACLPLELTKNESCLNSRETSFITNGSCLASRKTSFMMALCLSSIYEDLKMYQVEFK |
| | TMNAKLLMDPKRQIFLDQNMLAVIDELMQALNFNSETVPQKSSLEEPDFYKTKIKLC |
| | ILLHAFRIRAVTIDRVMSYLNAS |
| AK924 | 1^{st} polypeptide chain |
| | DKTHTCPPCPAPELLGGPSVFLFPPKPKDTLMISRTPEVTCVVVDVSHEDPEVKFNW |
| | YVDGVEVHNAKTKPREEQYASTYRVVSVLTVLHQDWLNGKEYKCKVSNKALPAPIEK |
| | TISKAKGQPREPQVCTLPPSRDELTKNQVSLSCAVKGFYPSDIAVEWESNGQPENNY |
| | KTTPPVLDSDGSFFLVSKLTVDKSRWQQGNVFSCSVMHEALHNHYTQKSLSLSPGGG |
| | SGGGSGKIDACKRGDVTVKPSHVILLGSTVNITCSLKPRQGCFHYSRRNKLILYKFD |
| | RRINFHHGHSLNSQVTGLPLGTTLFVCKLACINSDEIQICGAEIFVGVAPEQPQNLS |
| | CIQKGEQGTVACTWERGRDTHLYTEYTLQLSGPRNLTWQKQCKDIYCDYLDFGINLT |
| | PESPESNFTAKVTAVNSLGSSSSLPSTFTFLDIVRPLPPWDIRIKFQKASVSRSTLY |
| | WRDEGLVLLNRLRYRPSNSRLWNMVNVTKAKGRHDLLDLKPFTEYEFQISSKLHLYK |
| | GSWSDWSESLRAQTPEE |
| | 2^{nd} polypeptide chain |
| | DKTHTCPPCPAPELLGGPSVFLFPPKPKDTLMISRTPEVTCVVVDVSHEDPEVKFNW |
| | YVDGVEVHNAKTKPREEQYASTYRVVSVLTVLHQDWLNGKEYKCKVSNKALPAPIEK |
| | TISKAKGQPREPQVYTLPPCRDELTKNQVSLWCLVKGFYPSDIAVEWESNGQPENNY |
| | KTTPPVLDSDGSFFLYSKLTVDKSRWQQGNVFSCSVMHEALHNHYTQKSLSLSPGGG |
| | SGGSRAAAVKSPSGPIWELKKDVYVVELDWYPDAPGEMVVLTCDTPEEDGITWTLDQ |
| | SSEVLGSGKTLTIQVKEFGDAGQYTCHKGGEVLSHSLLLLHKKEDGIWSTDILKDQK |
| | EPKNKTFLRCEAKNYSGRFTCWWLTTISTDLTFSVKSSRGSSDPQGVTCGAATLSAE |
| | RVRGDNKEYEYSVECQEDSACPAAEESLPIEVMVDAVHKLKYENYTSSFFIRDIIKP |
| | DPPKNLQLKPLKNSRQVEVSWEYPDTWSTPHSYFSLTFSVQVQGKDNTEGRVFTDKT |
| | SATVICRKNASISVRAQDRYYSSSWSEWASVPCSGGGGSGGGGSGGGGSRNLPVATP |
| | DPGMFPCLHHSQNLLRAVSNMLQKARQTLEFYPCTSEEIDHEDITKDKTSTVEACLP |
| | LELTKNESCLNSRETSFITNGSCLASRKTSFMMALCLSSIYEDLKMYQVEFKTMNAK |
| | LLMDPKRQIFLDQNMLAVIDELMQALNFNSETVPQKSSLEEPDFYKTKIKLCILLHA |
| | FRIRAVTIDRVMSYLNAS |
| AK925 | 1^{st} polypeptide chain |
| | DKTHTCPPCPAPELLGGPSVFLFPPKPKDTLMISRTPEVTCVVVDVSHEDPEVKFNW |
| | YVDGVEVHNAKTKPREEQYASTYRVVSVLTVLHQDWLNGKEYKCKVSNKALPAPIEK |
| | TISKAKGQPREPQVCTLPPSRDELTKNQVSLSCAVKGFYPSDIAVEWESNGQPENNY |
| | KTTPPVLDSDGSFFLVSKLTVDKSRWQQGNVFSCSVMHEALHNHYTQKSLSLSPGGG |
| | SGGGSGKIDACKRGDVTVKPSHVILLGSTVNITCSLKPRQGCFHYSRRNKLILYKFD |
| | RRINFHHGHSLNSQVTGLPLGTTLFVCKLACINSDEIQICGAEIFVGVAPEQPQNLS |
| | CIQKGEQGTVACTWERGRDTHLYTEYTLQLSGPKNLTWQKQCKDIYCDYLDFGINLT |
| | PESPESNFTAKVTAVNSLGSSSSLPSTFTFLDIVRPLPPWDIRIKFQKASVSRSTLY |
| | WRDEGLVLLNRLRYRPSNSRLWNMVNVTKAKGRHDLLDLKPFTEYEFQISSKLHLYK |
| | GSWSDWSESLRAQTPEE |
| | 2^{nd} polypeptide chain |
| | DKTHTCPPCPAPELLGGPSVFLFPPKPKDTLMISRTPEVTCVVVDVSHEDPEVKFNW |
| | YVDGVEVHNAKTKPREEQYASTYRVVSVLTVLHQDWLNGKEYKCKVSNKALPAPIEK |
| | TISKAKGQPREPQVYTLPPCRDELTKNQVSLWCLVKGFYPSDIAVEWESNGQPENNY |
| | KTTPPVLDSDGSFFLYSKLTVDKSRWQQGNVFSCSVMHEALHNHYTQKSLSLSPGGG |
| | SGGSGGSRAAAVKSPSGPIWELKKDVYVVELDWYPDAPGEMVVLTCDTPEEDGITWT |
| | LDQSSEVLGSGKTLTIQVKEFGDAGQYTCHKGGEVLSHSLLLLHKKEDGIWSTDILK |
| | DQKEPKNKTFLRCEAKNYSGRFTCWWLTTISTDLTFSVKSSRGSSDPQGVTCGAATL |
| | SAERVRGDNKEYEYSVECQEDSACPAAEESLPIEVMVDAVHKLKYENYTSSFFIRDI |
| | IKPDPPKNLQLKPLKNSRQVEVSWEYPDTWSTPHSYFSLTFSVQVQGKDNTEGRVFT |
| | DKTSATVICRKNASISVRAQDRYYSSSWSEWASVPCSGGGGSGGGGSGGGGSRNLPV |
| | ATPDPGMFPCLHHSQNLLRAVSNMLQKARQTLEFYPCTSEEIDHEDITKDKTSTVEA |
| | CLPLELTKNESCLNSRETSFITNGSCLASRKTSFMMALCLSSIYEDLKMYQVEFKTM |
| | NAKLLMDPKRQIFLDQNMLAVIDELMQALNFNSETVPQKSSLEEPDFYKTKIKLCIL |
| | LHAFRIRAVTIDRVMSYLNAS |
| AK669 | 1^{st} polypeptide chain |
| | DKTHTCPPCPAPELLGGPSVFLFPPKPKDTLMISRTPEVTCVVVDVSHEDPEVKFNW |
| | YVDGVEVHNAETKPREEQYASTYRVVSVLTVLHQDWLNGKEYKCKVSNKALPAPIEK |
| | TISKARGQPREPQVCTLPPSRDELTKNQVSLSCAVKGFYPSDIAVEWESNGQPENNY |
| | KTTPPVLDSDGSFFLVSKLTVDKSRWQQGNVFSCSVMHEALHNHYTQKSLSLSPGPG |
| | GSGPKIDACKRGDVTVKPSHVILLGSTVNITCSLKPRQGCFHYSRRNKLILYKFDRR |
| | INFHHGHSLNSQVTGLPLGTTLFVCKLACINSDEIQICGAEIFVGVAPEQPQNLSCI |
| | QKGEQGTVACTWERGRDTHLYTEYTLQLSGPKNLTWQKQCKDIYCDYLDFGINLTPE |
| | SPESNFTAKVTAVNSLGSSSSLPSTFTFLDIVRPLPPWDIRIKFQKASVSRSTLYWR |
| | DEGLVLLNRLRYRPSNSRLWNMVNVTKAKGRHDLLDLKPFTEYEFQISSKLHLYKGS |
| | WSDWSESLRAQTPEE |
| | 2^{nd} polypeptide chain |
| | DKTHTCPPCPAPELLGGPSVFLFPPKPKDTLMISRTPEVTCVVVDVSHEDPEVKFNW |
| | YVDGVEVHNAKTKPREEQYASTYRVVSVLTVLHQDWLNGKEYKCKVSNKALPAPIEK |
| | TISKAKGQPREPQVYTLPPCRDELTKNQVSLWCLVKGFYPSDIAVEWESNGQPENNY |
| | KTTPPVLDSDGSFFLYSKLTVDKSRWQQGNVFSCSVMHEALHNHYTQKSLSLSPGGG |
| | SGGSISSGLLSGRSSGPIWELKKDVYVVELDWYPDAPGEMVVLTCDTPEEDGITWTL |
| | DQSSEVLGSGKTLTIQVKEFGDAGQYTCHKGGEVLSHSLLLLHKKEDGIWSTDILKD |
| | QKEPKNKTFLRCEAKNYSGRFTCWWLTTISTDLTFSVKSSRGSSDPQGVTCGAATLS |
| | AERVRGDNKEYEYSVECQEDSACPAAEESLPIEVMVDAVHKLKYENYTSSFFIRDII |
| | KPDPPKNLQLKPLKNSRQVEVSWEYPDTWSTPHSYFSLTFSVQVQGKDNTEGRVFTD |
| | KTSATVICRKNASISVRAQDRYYSSSWSEWASVPCSGGGGSGGGGSGGGGSRNLPVA |
| | TPDPGMFPCLHHSQNLLRAVSNMLQKARQTLEFYPCTSEEIDHEDITKDKTSTVEAC |
| | LPLELTKNESCLNSRETSFITNGSCLASRKTSFMMALCLSSIYEDLKMYQVEFKTMN |
| | AKLLMDPKRQIFLDQNMLAVIDELMQALNFNSETVPQKSSLEEPDFYKTKIKLCILL |
| | HAFRIRAVTIDRVMSYLNAS |
| AK670 | 1^{st} polypeptide chain |
| | DKTHTCPPCPAPELLGGPSVFLFPPKPKDTLMISRTPEVTCVVVDVSHEDPEVKFNW |
| | YVDGVEVHNAKTKPREEQYASTYRVVSVLTVLHQDWLNGKEYKCKVSNKALPAPIEK |
| | TISKAKGQPREPQVCTLPPSRDELTKNQVSLSCAVKGFYPSDIAVEWESNGQPENNY |
| | KTTPPVLDSDGSFFLVSKLTVDKSRWQQGNVFSCSVMHEALHNHYTQKSLSLSPGGG |
| | SPGKIDACKRGDVTVKPSHVILLGSTVNITCSLKPRQGCFHYSRRNKLILYKFDRRI |
| | NFHHGHSLNSQVTGLPLGTTLFVCKLACINSDEIQICGAEIFVGVAPEQPQNLSCIQ |
| | KGEQGTVACTWERGRDTHLYTEYTLQLSGPKNLTWQKQCKDIYCDYLDFGINLTPES |
| | PESNFTAKVTAVNSLGSSSSLPSTFTFLDIVRPLPPWDIRIKFQKASVSRSTLYWRD |
| | EGLVLLNRLRYRPSNSRLWNMVNVTKAKCRHDLLDLKPFTEYEFQISSKLHLYKGSW |
| | SDWSESLRAQTPEE |
| | 2^{nd} polypeptide chain |
| | DKTHTCPPCPAPELLGGPSVFLFPPKPKDTLMISRTPEVTCVVVDVSHEDPEVKFNW |
| | YVDGVEVHNAKTKPREEQYASTYRVVSVLTVLHQDWLNGKEYKCKVSNKALPAPIEK |
| | TISKAKGQPREPQVYTLPPCRDELTKNQVSLWCLVKGFYPSDKAVEWESNGQPENNY |
| | KTTPPVLDSDGSFFLYSKLTVDKSRWQQGNVFSCSVMHEALHNHYTQKSLSLSPGGG |
| | SGGSGGSISSGLLSGRSSGPIWELKKDVYVVELDWYPDAPGEMWLTCDTPEEDGITW |
| | TLDQSSEVLGSGKTLTIQVKEFGDAGQYTCHKGGEVLSHSLLLLHKKEDGIWSTDIL |
| | KDQKEPKNKTFLRCEAKNYSGRFTCWWLTTISTDLTFSVKSSRGSSDPQGVTCGAAT |
| | LSAERVRGDNKEYEYSVECQEDSACPAAEESLPIEVMVDAVHKLKYENYTSSFFIRD |
| | IIKPDPPKNLQLKPLKNSRQVEVSWEYPDTWSTPHSYFSLTFSVQVQGKDNTEGRVF |
| | TDKTSATVICRKNASISVRAQDRYYSSSWSEWASVPCSGGGGSGGGGSGGGGSRNLP |
| | VATPDPGMFPCLHHSQNLLRAVSNMLQKARQTLEFYPCTSEEIDHEDITKDKTSTVE |
| | ACLPLELTKNESCLNSRETSFITNGSCLASRKTSFMMALCLSSIYEDLKMYQVEFKT |
| | MNAKLLMDPKRQIFLDQNMLAVIDELMQALNFNSETVPQKSSLEEPDFYKTKIKLCI |
| | LLHAFRIRAVTIDRVMSYLNAS |

[0899] i) Ex Vivo Cleavage Assay (WB/IL-12 Signaling)

[0900] 1 uM of IL-12 construct were incubated with W0 ul of conditioned media overnight or 90 ul of plasma, for the following times (d1-d2-d4-d7-d9-d11) at 37° C. The cleavage rate is calculated as a ratio or, cleaved construct/(cleaved construct+ intact construct), using a western blot anti-human IL-12 and anti-human IL-12Rb. The activation of these constructs by human tissue conditioned media is assessed using a post-IL-12 receptor signalling assay where 0.05×106 HEK-Blue cells are incubated with 37.5 nM of constructs, for 24h.

[0901] The flowchart used in this Example is shown in FIG. 72.

[0902] Results are shown in FIG. 40 and in the tables below.

[0903] Molecules with the following cleavage sites exhibited readily detectable cleavage in the tumor supernatants:

RAAAVKSP
ISSGLLSGRS
MPYDLYHP

[0904] The cleavage sites sensitivity was observed in the following order:

RAAAVKSP>ISSGLLSGRS>MPYDLYHP

[0905] Therefore, the IL-12 constructs that harbor these cleavage sites represent good candidates for tumor selective activation in RCC and other types of cancers.

| Cutoff 1%, n = 30 | % Cleavage | | | | % Activity (signalinh assay) | | | |
|---|---|---|---|---|---|---|---|---|
| | ISSGLLSGRS | | | | ISSGLLSGRS | | | |
| | AK669 | AK670 | AK922 | AK923 | AK669 | AK670 | AK922 | AK923 |
| % of samples with >1% Cleavage, activity | 2 | 5 | 2 | 2 | 3 | 9 | 1 | 8 |
| Frequency of cleavage, activation (%) | 6.7 | 16.7 | 6.7 | 6.7 | 10.0 | 30.0 | 3.3 | 26.7 |
| % Activation (Median) | 5.5 | 1.8 | 5.8 | 8.2 | 1.7 | 2.2 | 5.8 | 1.2 |
| | RAAAVKSP | | | | RAAAVKSP | | | |
| | AK920 | AK921 | AK924 | AK925 | AK920 | AK921 | AK924 | AK925 |
| % of samples with >1% Cleavage, activity | 7 | 4 | 3 | 3 | 7 | 5 | 6 | 7 |
| Frequency of cleavage, activation (%) | 23.3 | 13.3 | 10.0 | 10.0 | 23.3 | 16.7 | 20.0 | 23.3 |
| % Activation (Median) | 1.8 | 2.0 | 13.6 | 2.6 | 1.9 | 2.5 | 1.8 | 1.7 |
| | | MPYDLYHP | | | | MPYDLYHP | | |
| | | AK667 | AK668 | | | AK667 | AK668 | |
| % of samples with >1% Cleavage, activity | | 2 | 2 | | | 5 | 8 | |
| Frequency of cleavage, activation (%) | | 6.7 | 6.7 | | | 16.7 | 26.7 | |
| % Activation (Median) | | 2.3 | 2.7 | | | 1.5 | 1.7 | |
| | | VPLSLYSG | | | | VPLSLYSG | | |
| | | AK665 | AK666 | | | AK665 | AK666 | |
| % of samples with >1% Cleavage, activity | | 7 | 1 | | | 7 | 4 | |
| Frequency of cleavage, activation (%) | | 23 | 3 | | | 23 | 13 | |
| % Activation (Median) | | 2.5 | 1 | | | 2.1 | 1.6 | |
| | | DSGGFMLT | | | | DSGGFMLT | | |
| | | AK918 | AK919 | | | AK918 | AK919 | |
| % of samples with >1% Cleavage, activity | | 5 | 4 | | | 3 | 5 | |
| Frequency of cleavage, activation (%) | | 17 | 13 | | | 10 | 17 | |
| % Activation (Median) | | 1.8 | 2.1 | | | 1.7 | 1.3 | |

[0906] ii) In Vitro Cleavage Analysis: HEK Blue IL-12 and SDS-PAGE Analysis

[0907] Testing IL-12 molecules with HEK-Blue IL-12 cells:

[0908] HEK-Blue IL-2 reporter cells developed by Invivogen have been specifically designed to monitor the activation of the JAK-STAT pathway. These cells were generated by stable transfection of HEK293 cells with the human IL-12Rβ1 and IL-12Rβ2 genes, along with the human TyK2, JAK2, and STAT4 genes to obtain a fully functional IL-12 signaling pathway. In addition, a STAT4-inducible SEAP reporter gene was also introduced. Upon stimulation. HEK-Blue™ IL-12 cells trigger the activation of STAT4 and the subsequent secretion of SEAP. The levels of STAT4-induced SEAP can be readily monitored using QUANTI-Blue™. HEK-Blue IL-12 cells can be used to validate the functionality, toxicity, and variable dosage effects of human or murine IL-12. HEK Blue IL-12 cells were grown in passage media until ˜80% confluent. Washed single-cell suspension in assay media was plated and serial dilutions of IL-12 molecules in assay media were added to cells. Plate was incubated at 37° C. for 24 h. After 24 h. Quanti-Blue solution (Invivogen) was prepared and cell supernatant was added to the Quanti-Blue solution and incubated for 1-2 h at 37° C. Absorbance at 625 nm measured. Data analysis was performed in Graphpad Prism, version 8.3. Background was subtracted from raw data and the data were fit nonlinearly: [Agonist] vs. response-Variable slope (four parameters). EC50 value of each IL-12 construct was reported.

### Masking:

[0909] Results are shown in the tables below and in FIGS. 47, 48A and B.

| | Run 1, | | Run 2, | | Average |
|---|---|---|---|---|---|
| Construct | EC₅₀ | Aklusion | EC₅₀ | Aklusion | Aklusion |
| AK671 | 24.7 | N/A | 15.2 | N/A | N/A |
| rhlL-12 | 9.6 | N/A | 8.2 | N/A | N/A |
| AK386 null | 477.9 | 19.4 | 367.5 | 14.9 | 17.1 |
| AK664 null | 1854.0 | 75.2 | 1677.0 | 68.0 | 71.6 |
| AK665 null | 1303.0 | 52.9 | 1491.0 | 60.5 | 56.7 |
| AK666-01A null | 1775.0 | 72.0 | 2009.0 | 81.5 | 76.8 |
| AK666-02A null | 1725.0 | 70.0 | 1537.0 | 62.4 | 66.2 |
| AK667 null | 3104.0 | 125.9 | 2035.0 | 82.6 | 104.2 |
| AK668 null | 1383.0 | 56.1 | 1370.0 | 55.6 | 55.8 |
| AK669 null | 895.6 | 36.3 | 1193.0 | 48.4 | 42.4 |
| AK670 null | 740.9 | 30.1 | 862.1 | 35.0 | 32.5 |
| AK922 null | 1183.0 | 48.0 | 1101.0 | 44.7 | 46.3 |
| AK923 null | 1562.0 | 63.4 | 1188.0 | 48.2 | 55.8 |
| AK918 null | 2886.0 | 117.1 | 3116.0 | 126.4 | 121.7 |
| AK919 null | 1230.0 | 49.9 | 1475.0 | 59.8 | 54.9 |
| AK920 null | 1116.0 | 45.3 | 1116.0 | 45.3 | 45.3 |
| AK921 null | 1638.0 | 68.9 | 1352.0 | 54.8 | 61.9 |
| AK924 null | 1030.0 | 41.8 | 766.4 | 31.1 | 36.4 |
| AK925 null | 995.1 | 40.4 | 914.8 | 37.1 | 38.7 |

[0910] Parental AK671 is less potent than rhIL-12 (but not significantly, i.e. 3 Mold). All masked constructs are more akluded than AK386, AK067 and AK918 are both >100-fold akluded.

[0911] As compared to AK386, the new molecules that have the GAG-binding domain mutation, the cysteines to serines mutations, new optimized linkers, as well as different cleavage sites, all exhibit improved masking.

### Cleavage:

[0912] Cleavage of the constructs was testing using exemplary proteases MMP7, 9 and 10.

### Batch 1

| | | 300 ng | Total construct |
|---|---|---|---|
| AK ID | Protein Lot # | MMP | cleaved, ug |
| AK663 | AK663-01A | 7 | 8.8 |
| AK664 | AK664-01A | 7 | 14.8 |
| AK665 | AK665-01A | 7 | 14.8 |
| AK666 | AK666-01A | 7 | 14.8 |
| AK667 | AK667-01A | 10 | 14.9 |
| AK668 | AK668-01A | 10 | 14.9 |
| AK669 | AK669-01A | 2 | 14.9 |
| AK670 | AK670-01A | 2 | 14.9 |
| AK671 | AK671-01A | 7 | 11.3 |
| AK386 | AK386-03A | 7 | 14.9 |
| AK674 | AK674-01A | 7 | 15.1 |

[0914] Results are shown in FIGS. 49A-H and 50A-K

### Batch 2

| | | 300 ng | Total construct |
|---|---|---|---|
| AK ID | Protein Lot # | MMP | cleaved, ug |
| AK667 | AK667-01A | 7, 9, 10 | 14.86 |
| AK671 | AK671-01A | 7, 9, 10 | 11.31 |
| AK918 | AK918-01A | 7 | 14.84 |
| AK919 | AK919-01A | 7 | 14.85 |
| AK920 | AK920-01A | 8 | 14.83 |
| AK921 | AK921-01A | 9 | 14.84 |
| AK386 | AK386-03A | 7 | 14.90 |

[0916] Re-suits are shown in FIGS. 51A-B and 52A-G

| | | 300 ng | Total construct |
|---|---|---|---|
| AK ID | Protein Lot # | MMP | cleaved, ug |
| AK386 | AK386-04A | 7, 10 | 14.9 |
| AK922 | AK922-01A | 7 | 14.9 |
| AK923 | AK923-01A | 7 | 14.9 |
| AK924 | AK924-01A | 10 | 14.8 |
| AK925 | AK925-01A | 10 | 14.9 |
| AK671 | AK671-02A | N/A | N/A |

[0917] Results are shown in FIGS. 53 and 54A-E

[0918] Overall, the new molecules with different cleavage sites are all susceptible to MMP cleavage in vitro. For all the molecules, there is a restoration or activity post cleavage. These compounds represent good candidates for tumor selective activable IL-12 molecules.

### Example 10

[0919] The following constructs were used in this example:

### Control Molecules (as Shown in FIG. 73)

[0920] Positive control: unmasked AK904
[0921] Cleavage control: masked, non-cleavable AK910

### Masked Cleavable Molecules: (as Shown in FIG. 74)

[0922] Cytokine-substrate construct: AK930
[0923] Mask-substrate construct: AK936

[0924] Details on the domain features and sequences of each AK molecule is set out in Example 8.

### CT26 Murine Tumor Model—In Vivo Evaluation of the PD of Test Articles in the Treatment of CT26 Tumor Bearing Mice

[0925] Balb/c mice were injected with CT26 cells s.c, and monitored for tumor growth. Once tumor sizes reached 175-223 mm3, animals were randomized (n=4 per group). A single i.v. injection of test article was administered at dose levels according to the table. Body weights were measured on day 0 and day 5. On day 5, animals were sacrificed, and tissues were collected for immunophenotyping.

| | | Dosing | Dosing |
|---|---|---|---|
| | Test Molecule | (nMoles/kg) | (mg/kg) |
| 1 | Vehicle | * | * |
| 2 | AK904 (parental) | 6.7 | 0.43 |
| 3 | AK904 (parental) | 22.2 | 1.45 |
| 4 | AK910 (NC) | 222 | 20 |
| 5 | AK930 | 66.6 | 6 |
| 6 | AK930 | 222 | 20 |
| 7 | AK936 | 66.6 | 6 |
| 8 | AK936 | 22.2 | 2 |

* Vehicle volume is the same volume of the highest-dosed group.

[0926] The Results are as follows,

[0927] i) Tissue Weight, Tumor Weight and Body Weight Change (%) on Day 5

[0928] FIG. 55A: Mice treated with high dose AK904 and AK931 and low and high doses of AK936 demonstrated a significant loss in body weight.

[0929] FIG. 55B: No significant difference in tumor volume was observed across all treated mice.

[0930] FIG. 55C: Mice treated with high dose AK904 and AK936 demonstrated a significant increase in lung weight.

[0931] FIG. 55D: A significant increase in spleen weight was demonstrated in all mice treated with test article, either with low dose, high dose, or both dosing regimens.

[0932] ii) NK Cell Frequency

[0933] FIGS. 56A and B: Mice demonstrated a dose-dependent increase in % NK cells in the blood and spleen.

[0934] FIG. 56C: Mice in all treatment groups demonstrated increase % NK in the tumor.

[0935] iii) NK Ki67 MFI

[0936] FIGS. 57A, B, and C: Mice demonstrated a dose-dependent increase in proliferation marker K167 in NK cells in the blood, spleen, and tumor.

[0937] iv) CD8+ T Cell Frequency

[0938] FIG. 58A: Mice treated with unmasked AK904 demonstrated a dose-dependent increase in % CD8 T cells in the blood.

[0939] FIG. 58B: Mice demonstrated a dose-dependent increase in % CDR T cells in the spleen.

[0940] FIG. 58C: Mice in all treatment groups did not demonstrate an increase % CD8 T cells in the tumor (inconclusive evidence).

[0941] v) CD8+ T Ki67 MF1

[0942] FIGS. 59A and B: Mice demonstrated a dose-dependent increase in proliferation marker Ki67 in CD8 T cells in the blood and spleen.

[0943] FIG. 59C: Mice in all treatment groups did not demonstrate an increase in Ki67 in CD8 T cells in the tumor.

[0944] vi) CD8+T:Treg Ratio

[0945] FIGS. 60A and B: Mice treated with AK904 and AK936 demonstrated a dose-dependent increased CD8/Treg ratio in the blood and spleen.

[0946] FIG. 60C: Mice treated with AK904, AK930 and AK936 demonstrated a dose-dependent increased CD8/Treg ratio in the tumor,

### B16F10 Murine Tumor Model—IL-15 PKPD Stub, in B16-F10 Model

[0947] C57BL/6) mice were injected with MC38 cells s.c. and monitored for tumor growth. Once tumor sizes reached 175-225 mm3, animals were randomized (n=4 per group, except for AK904 and vehicle groups, which contained n8 per group), A single i.v. injection of test article was administered at dose levels according to the table. Plasma was collected at 5 mini, 2 h, 6 h, and on day 5 for PK analysis, Body weights were measured on day 0 and day 5. On day 5, animals were sacrificed, and tissues were collected for immunophenotyping.

| | | Dosing | Dosing |
|---|---|---|---|
| | Test Molecule | (nMoles/kg) | (mg/kg) |
| 1 | Vehicle | * | * |
| 2 | AK904 (parental) | 6.7 | 0.43 |
| 3 | AK904 (parental) | 22.2 | 1.45 |
| 4 | AK910 (NC) | 66.6 | 6 |
| 5 | AK910 (NC) | 222 | 20 |
| 6 | AK930 | 66.6 | 6 |
| 7 | AK930 | 222 | 20 |
| 8 | AK936 | 66.6 | 6 |
| 9 | AK936 | 222 | 20 |

* Vehicle volume is the same volume of the highest-dosed group.

[0948] The Results are as follows.

[0949] i) Tissue Weight, Tumor Weight and Body Weight Change (%) on Day 5

[0950] FIG. 61A: Mice treated with high dose AK904 and AK936 demonstrated a significant loss in body weight.

[0951] FIG. 61B: No significant difference in tumor volume was observed across all treated mice.

[0952] FIG. 61C: Mice treated with low and high dose AK904 and AK936 demonstrated a significant increase in lung weight.

[0953] FIG. 61D: No significant increase in spleen weight was demonstrated in any mice treated with test article.

[0954] ii) Masked IL-15 Showed Longer Half-Life than Unmasked Control

[0955] FIG. 62A: A similar PK profile is observed between molecules AK910, AK930 and AK936.

[0956] FIG. 62B: AK910, AK930 and AK936 have 2-3 fold longer half-life, compared to AK904.

[0957] FIGS. 62C and D: AK910, AK930 and AK936 have similar and dose-dependent Cₘₐₓ and AUC_{(O-last),} as expected.

[0958] iii) NK

[0959] FIGS. 63A-C: Mice demonstrated a dose-dependent increase in % NK cells in the blood, spleen, and tumor.

[0960] iv) CD8+ T Cell

[0961] FIGS. 64A and B: Mice treated with AK904 and AK936 demonstrated an increase in % CD8 T cells in the blood and spleen.

[0962] FIG. 64C: Mice in all treatment groups demonstrated an increase % CD8 T cells in the tumor.

[0963] v) CD8+T:Treg Ratio

[0964] FIGS. 65A and B: Mice treated with AK90 and AK936 demonstrated an increased CD8/Treg ratio in the blood and spleen.

[0965] FIG. 65C: Mice treated with AK904, AK930 and AK936 demonstrated a dose-dependent increased CD8/Treg ratio in the tumor.

### Example 11

[0966] The following construct was used in this Example (FIG. 75):

### AK923 (ISSGLGLRS) IL-12: Ex Vivo Cleavage by Human Tumor

[0967] The process of ex vivo human tumor cleavage assay is shown in FIG. 76A. Human primary tumor tissues were gently dissociated and culture for 1, 2 or 3 days (500 mg in 30 ml RPMI). Conditioned media (90 μl), containing proteases secreted by the tumor and its microenvironment, was collected for incubation with the AK923 molecules (1 μM) for 24 hours, at 37 C. The percentage of cleaved molecule was quantified using the fluorescent triplex western blot. The frequency of cleavage represents the % of tumor samples which were able to cleave the drug. Results are shown in FIG. 66.

[0968] FIG. 76B shows flow-chart for evaluation of AK923 cleavage by various tumor cells. AK923 drug (1 μM) was incubated in 90 μL of plasma from Healthy human Control Donors (10 donors), Melanoma 3 patients (8 donors) and Head and Neck patients (10 donors), for 1, 2, 4, 7, 9, and 11 days at 37° C. The percentage of cleaved molecule was quantified using the fluorescent triplex western blot. Data points represent the median of 8 or 10 donors. Results are shown in FIG. 67.

[0969] The present invention is not intended to be limited in scope to the particular disclosed embodiments, which are provided, for example, to illustrate various aspects of the invention. Various modifications to the compositions and methods described will become apparent from the description and teachings herein. Such variations may be practiced without departing from the true scope and spirit of the disclosure and are intended to fall within the scope of the present disclosure.

### 10. Sequences

| | NEW SEQ | Exemplary | |
|---|---|---|---|
| DESCRIPTION | ID NO. | AK number | AMINO ACID SEQUENCE |
| IL-2 | 1 | | MYRMQLLSCIALSLALVTNSAPTSSSTKKTQLQLEHLLLDLQMILNGIN |
| precursor | | | NYKNPKLTRMLTFKfYHPKKATELKHLQCLEEELKPLEBVLNLAQSKNF |
| | | | HLRPRDLISNIVIVLELKGSETTYMCEYADETATIVEFLNRWITFCQSI |
| | | | ISTLT |
| IL-2 mature | 2 | | APTSSSTKETQLQLEHLLLDLQMILNGINNYKSPKLTRMLTFKFYMPKK |
| | | | ATELKHLQCLEEETKFLEEVLNLAQSKNFHLRPRDLISNINVIVLELKG |
| | | | SETTFMCEYADETATIVEFLNRWIFCQSIISTLT |
| IL-2 (R38A, | 3 | AK168 | APTSSSTKKTQLQLEHLLLDLQMILNGINNYKNPKLTAMLTAKFAMPKK |
| F42A, Y45A, | | AK191 | ATELRHLQCLEEALKPLEEVLNLAQSKNFHLRPRDLISNINVIVLELKG |
| E62, C125A) | | AK197 | SETTFMCEYADETATIVEFLNRWITFAQSIISTLT |
| | | AK203 | |
| | | AK471 | |
| | | AK442 | |
| | | AK438 | |
| | | AK34l | |
| | | AK530 | |
| | | AK539 | |
| | | AK540 | |
| | | AK541 | |
| | | AK523 | |
| | | AK524 | |
| | | AK525 | |
| MM | 4 | AK168 | AVSGTSQFTCFYNSRANISCVWSQDGALQDTSCQVHAWPDRRRNNQTCE |
| | | AK209 | LLPVSQASWACNLILGAPDSQKLTTVDIVTLRVLCREGVRWRVMAIQDF |
| | | AK191 | KPFENLRLMAPISLQVVHVETHRCNISWEISQASHYFERHLEFEARTLS |
| | | AK197 | PGHTWEEAPLLTLKQRQEWICLETLTFDTQYEFQVRVKPLQCEFTTWSP |
| | | AK203 | WSQPLAFRTKPAALGKD |
| | | AK471 | |
| | | AK442 | |
| | | AK438 | |
| | | AK539 | |
| | | AK540 | |
| | | AK541 | |
| | | AK523 | |
| | | AK524 | |
| | | AK525 | |
| MM (C122S, | 5 | AK341 | AVNGTSQFTCFYNSRANISCVWSQDGALQDTSCQVHAWPDRRRWNQTCE |
| C168S) | | AK530 | LLPVSQASWACNLILGAPDSQKLTTVDIVTLRVLCREGVRWRVMAIQDF |
| | | | KPFENLRLMAPISLQVVHVETHRSNISWEISQASHYFERHLEFEARTLS |
| | | | PGHTWEEAPLLTLKQKQEWISLETLTPDTQYEFQVRVKPLQGEFTTWSP |
| | | | WSQPLAFRTKEAALGKD |
| Parent | 6 | | ASTKGPSVFPLAPSSKSTSGGTAALGCLVKDYFPEPVTVSWNSGALTSG |
| IgG1_human | | | VHTFPAVLQSSGLYSLSSVVTVPSSSLGTQTYICNVNHKPSNTKVDKKV |
| heavy chain | | | EPKSCDKTHTCPPCPAPELLGGPSVFLFPPKPKDTLMISRTPEVTCVVV |
| constant | | | DSHEDPEVRFNWYVDGVEVHNAKTKPREEQYYNSTYRVVSVLTVLEQDN |
| gamma 1 | | | LNGKEYKCKVSNKALPAPIERTISKARCQPRERQVYTLPPSRDELTKNQ |
| | | | VSLTCLKGFYPSDIAVENESNGQPENNYKTTPPVLDSDGSFFLYSKLST |
| | | | VDRSRNQQGNVFSCSVMHEALHNHYTOKSLSLSPGE |
| Parent | 7 | | DKTATCPPCPAFELLGGPSVFLFPPKEKDTLMISRTPEVTCVWVDVSHE |
| IgG1_human | | | DPEVKFNWYVDGVEVMNAETKEREEQYNSTYRVVSVLTVLHQDWLNGKE |
| heavy chain | | | YKCKVSNKALPAPTERTISKAEGQEREPQVYTLPPSRDELTKNQVSLTC |
| constant | | | LVKGFYPSDIAVEWESNGQPENNYKTTPPVLDSDGSFFLYSKLTVDKSR |
| gamma 1 - Fc | | | WQQGNVFSCSMNNHEALHNHYTORSLSLSPG |
| domain | | | |
| HL1 (Y349C, | 8 | | DKTHTCPPCPAPELLGGPSVFLFPPKPKDTLMISRTPEVTCVVVDVSHE |
| T366S, L38A, | | | DPEVKFNWYVDGVEVHNAKTKPREEQYNSTYRVVSVLTVLHQDWLNGKE |
| Y407V) | | | YKCKVSNKALPAPIEKTISKAKGQPREPQVCTLPPSRDELTKNQVSLSC |
| | | | AVSGFYPSDIAVEWESNGQPENNYKTTPPVLDSDGSFFLSKLTVDKSRW |
| | | | QQGNVFSCSVMHEALHNHYTQKSLSLSPG |
| HL1 (Y349C, | 9 | AK168 | DKTHTCPPCPAPELLGGPSVFLFPPKPKDTLMISRTPEVTCVVVDVSHE |
| T366S, L38A, | | AK209 | DPEVKFNWYVDGVEVHNAKTKPREEQYASTYRVVSVLTVLHQDWLNGKE |
| Y407V, | | AK191 | YSCKYSNKALPAPIEKTISKAKGQPREPQVCTLPPSRDELTKNQVSLSC |
| N2972A) | | AK197 | AVKGFYPSDIAVEWESNGQPENNYKTTPPVLDSDGSFFLVSKLTVDKSR |
| | | AK203 | WQQGNVFSCSVMHEALHNHYTQRSLSLSPG |
| | | AK442 | |
| | | AK430 | |
| | | AK34l | |
| | | AK530 | |
| | | AK539 | |
| | | AK540 | |
| | | AK541 | |
| | | AK523 | |
| | | AK524 | |
| | | AK525 | |
| HL1 (Y349C, | 10 | AK471 | DKTHTCPPCPAPELLGGPSVFLFPPKPKDTLMASRTPEVTCVVVDVSHE |
| T366S, L38A, | | | DPEVKFNWYVDGVEVHNAKTKPREEQYASTYRVVSVLTVLHQDWLNGKE |
| Y407V, | | | YKCKVSNKALPAPIEKTISKAKGQPREPQVCTLPPSRDELTKNQVSLSC |
| N297A, | | | AVKGFYPSDIAVEWESNGQPENNYKTTPPVLDSDGSFFLVSKLTVDKSR |
| I253A) | | | WQQGNVFSCSVMHEALHNHYTQKSLSLSPG |
| HL2 (S354C, | 11 | | DKTHTCPPCPAPELLGGPSVFLFPPKPKDTLMISRTPEVTCVVVDVSHE |
| T366W) | | | DPEVKFNWYVDGVEVHNAKTKPREEQYNSTYRVVSVLTVLHQDWLNGKE |
| | | | YKCKVSNKALPAPIEKTISKAKGQPREPQVYTLPPCRDELTKNQVSLWC |
| | | | LVKGFYPSDIAVEWESNGQPENNYKTTPPVLDSDGSFFLYSKLTVDESR |
| | | | NQQGNVFSCSVMHEALHNRYTQKSLSLSPG |
| HL2 (S354C, | 12 | AK168 | DKTHTCPPCPAPELLGGPSVFLFPPKPKDTLMISRTPEVTCVVVDVSHE |
| T366W, | | AK209 | DPEVKFNWYVDGVEVHNAKTKPREEQYASTYRVVSVLTVLHQDWLNGKE |
| N297A) | | AKl91 | YKCKVSNKALPAPIEKTISKAKGQPREPQVYTLPPCRDELTKNQVSLWC |
| | | AK197 | LVKGFYPSDIAVEWESNGQPENNYKTTPPVLDSDGSFFLYSKLTVDKSR |
| | | AK203 | WQQGNVFSCSVMHEALHNHYTQKSLSLSPG |
| | | AK442 | |
| | | AK438 | |
| | | AK341 | |
| | | AK530 | |
| | | AK539 | |
| | | AK540 | |
| | | AK541 | |
| HL2 (S354C, | 13 | AK471 | DKTHTCPPCPAPELLGGPSVFLFPPKPKDTLMASRTPEVTCVVVDVSHE |
| T366W, | | | DPEVKFNWYVDGVEVHNAKTKPREEQYASTYRVVSVLTVLHQDWLNGKE |
| N297A, | | | YKCKVSNKALPAPIEKTLSKAKGQPREPQVYTLPPCRDELTKNQVSLWC |
| I253A) | | | LVKGFYPSDIAVEWESNGQPENNYKTTPPVLDSDGSFFLYSKLTVDRSR |
| | | | WQQGNVFSCSVMHEALHNHYTQKSLSLSPG |
| 1^{st} linker | 14 | AK168 | PSGS |
| (non- | | AK209 | |
| (cleavable) | | AK191 | |
| | | AK197 | |
| | | AK203 | |
| | | AK471 | |
| | | AK341 | |
| | | AK539 | |
| | | AK540 | |
| | | AK541 | |
| 1^{st} linker | 15 | AK442 | GGPSGSSPGDSGGFMLTSGGG |
| L1 | | | |
| (cleavable) | | | |
| 1^{st} linker | 16 | AK438 | GPPSGSSPGVPLSLYGSGGG |
| L1 | | | |
| (cleavable) | | | |
| 1^{st} linker | 17 | AK530 | GPPSGSSPMPYDLYHPSGG |
| L1 | | | |
| (cleavable) | | | |
| 1^{st} linker | 242 | AK523 | GSPDLLAVVAASSGP |
| L1 | | | |
| (cleavable) | | | |
| 1^{st} linker | 243 | AK524 | GSPGDLLAVVAASSGP |
| L1 | | | |
| (cleavable) | | | |
| 1^{st} linker | 244 | AK525 | GSGSPSDLLAVVAASSGP |
| L1 | | | |
| (cleavable) | | | |
| 2^{nd} linker | 18 | AK168 | GGSSPPMPYDLYHPSGP |
| L2 | | | |
| (cleavable) | | | |
| 2^{nd} linker | 19 | AK209 | GSPGVPLSLYSGP |
| L2 | | AK471 | |
| (cleavable) | | AK341 | |
| 2^{nd} linker | 20 | AK191 | GGSGRAAAVKSPSGP |
| L2 | | | |
| (cleavable) | | | |
| 2^{nd} linker | 21 | AK197 | GGSGHEQLTVSGP |
| L2 | | | |
| (cleavable) | | | |
| 2^{nd} linker | 22 | AK203 | GSGPDSGGFMLTSGP |
| L2 | | | |
| (cleavable) | | | |
| 2^{nd} linker | 23 | AK442 | GGSSPPGGGSSGGGSGP |
| L2 (non- | | AK438 | |
| (cleavable) | | AK530 | |
| | | AK523 | |
| | | AK524 | |
| | | AK525 | |
| 2^{nd} linker | 245 | AE539 | GGPSDLLAVVAASSGP |
| L2 | | | |
| (cleavable) | | | |
| 2^{nd} linker | 246 | AK540 | GSGPSDLLAVVAASSGP |
| L2 | | | |
| (cleavable) | | | |
| 2^{nd} linker | 247 | AK541 | GSSGGPDLLAVVAASSGP |
| L2 | | | |
| (cleavable) | | | |
| Cleavable | 24 | AK16B | MPYD*LYHP |
| peptide | | AK530 | *indicates cleavage site |
| Cleavable | 25 | AK203 | DSCG*FMLT |
| peptide | | AK442 | *indicates cleavage site |
| Cleavable | 26 | AK197 | HEQ*LTV |
| peptide | | | *indicates cleavage site |
| Cleavable | 27 | AK191 | RAAA*VKSP |
| peptide | | | *indiCates cleavage site |
| Cleavable | 28 | AK209 | VPLS*LY |
| peptide | | AK471 | *indicates cleavage site |
| | | AK341 | |
| | | AK438 | |
| Cleavable | 248 | AK50 | DLLA*VVAAS |
| peptide | | AK539 | *indicates cleavage site |
| | | AK540 | |
| | | AK541 | |
| | | AK523 | |
| | | AK524 | |
| | | AK525 | |
| Cleavable | 249 | AK88 | I*SSG*LLSGRS |
| peptide | | | *indicates cleavage site |
| C terminal | 29 | AK168 | SGP |
| spacer | | AK209 | |
| domain | | AK191 | |
| | | AK197 | |
| | | AK203 | |
| | | AK471 | |
| | | AK348 | |
| | | AK539 | |
| | | AK540 | |
| | | AK541 | |
| | | AK523 | |
| | | AK524 | |
| | | AK525 | |
| C terminal | 30 | AK442 | SGGG |
| spacer | | AK530 | |
| domain | | | |
| C terminal | 31 | AK438 | GSGGG |
| spacer | | | |
| domain | | | |
| N terminal | 32 | AK168 | GGSSPP |
| spacer | | | |
| domain | | | |
| N terminal | 33 | AK203 | GSGP |
| spacer | | | |
| domain | | | |
| N terminal | 34 | AK209 | GSPG |
| spacer | | AK341 | |
| domain | | AK471 | |
| | | AK524 | |
| N terminal | 35 | AK191 | GGSG |
| spacer | | AK197 | |
| domain | | | |
| N terminal | 36 | AK442 | GPPSGSSPG |
| spacer | | AK348 | |
| domain | | | |
| N terminal | 37 | AK530 | GPPSGSSP |
| spacer | | | |
| domain | | | |
| N terminal | 250 | AK539 | GGPS |
| spacer | | | |
| domain | | | |
| N terminal | 251 | AK540 | GSGPS |
| spacer | | | |
| domain | | | |
| N terminal | 252 | AK541 | GSSGGP |
| spacer | | | |
| domain | | | |
| N terminal | 253 | AK523 | GSP |
| spacer | | | |
| domain | | | |
| N terminal | 254 | AK525 | GSGSPS |
| spacer | | | |
| domain | | | |
| 1^{st} | 38 | AK168 | DKTRTCPPCPAPELLGGESVFLFPPKPKDELMLSRTPEVTCVVVDVSHE |
| polypeptide | | AK192 | DPEVKFNWYVDGVEVHNAKTKPREEQYASTYRWVSVLTVLHQDWLNGKE |
| chain - A | | AK197 | YKCKVSNKALPAPLERTLSKAKGZPREPQVCTLPPSRDELTKNQVSLSC |
| (HL1-L1-MM) | | AK203 | AVKGFYPSDIAVENESNGQPENNYKTTPPVLDSDGSFFLVSKLTVDKSR |
| | | AK209 | WQQGNVFSCSVMHEALHNHYTQKSLSLSPGPGSGSAVNGTSQFTCEYNS |
| | | AK539 | EANISCVWSQDGALQDPSCQVHAWPDRRRNNQTCELLPVSQASWACNLI |
| | | AK540 | LGAPDSQKLTTVDIVTLRVLGREGVRWRVMAIQDFSPFENLRLMAPISL |
| | | AK541 | QVVHVETERCNISWEISQASHYFERHLEFEARTLSPGHTKEEAPLLTLR |
| | | | QKQEWICLETLPDTQYEFQVRVKPLQGEFTTWSPWSQPLAFRTRPAALG |
| | | | KD |
| 1^{st} | 39 | AK341 | DKTHTCPPCPAPELLGGPSVFLFPPKPKDTLMISRTPEVTCVVVDVSHE |
| polypeptide | | | DPEVKFNWYVDGVEVHNAKTEPREEQYASTYRVVSVLTVLHQDWLSGKE |
| chain - B | | | YKCRVSNSALPAPIEKTISKAKGQPREPQVCTLPPSRDELTENQVSLSC |
| (HL1-L1-MM) | | | AVKGFYPSDIAVEWESNGQPENNYKTTPRVLDSDSSFFLVSKLTVDKSR |
| | | | WQQGNVFSCSVMHEALHNHYTQKSLSLSPGPGSGSAVNGTSCFTCFYNS |
| | | | RANISCVWSQDGALQDTSCQVHAWPDRRRWNQTCELLPVSQASWACNLI |
| | | | LGAPDSQKLTTVDIVTLRVLCREGVRWRVMAIQDFKPFENLRLMAPISL |
| | | | QVVHVETHRSNISWEISQASHYFERHLEFEARTLSPGHTWEEAPLLTLR |
| | | | QKQEWISLETLTPDTQYEFQVRVKPLQGEFTTWSPWSQPLAFRTKPAAL |
| | | | GKD |
| 1^{st} | 40 | AK530 | DKTHTCPPCPAPELLGGPSVFLFPPKPKDTLMISRTPEVTCVVVDVSHE |
| polypeptide | | | DPEVKFSWYVDGVEVBNAKTKFRSSQVASTYRWSVLTVLTHQDWLEGKE |
| chain - C | | | YKCKVSNKALPAPIEKTISKAKGQFEEPQVCTLPFSRDSLYKNQVSLSC |
| (HL1-L1-MM) | | | AVKSFYPSDIAVREWESNGQPENNYKTTPPVLDSDGSFFLVSKLTVDKS |
| | | | RWQQGNVFSCSVMHEALHNHYTQKSLSLSPGGPPSGSSPMPYDLYHPSG |
| | | | GGAVNGTSQFTCFYNSRANISCVWSQDGALQDTSCQVHAWPDRRRWNQT |
| | | | CELLPVSQASWANLILGAPDSQKLTTVDIVTLRVLCREGVRWRVMAIQD |
| | | | FKPFENLRLMAPISLQVVHVETHRSNISWEISQASHYFERHLEFEARTL |
| | | | SPGHTKEEAPLLTLKQKQEWISLETLTPDTQYEFQVRVKPLGGEFTTWS |
| | | | FWSQPLAFRTKPAALGKD |
| 1^{st} | 41 | AK442 | DKTHTCPPCPAPELLGGPSVFLFPPKPKDTLMISRTPEVTCVVVDVSHE |
| polypeptide | | | DPEVKNWTVDGVEVHNAKTKPREEQYASTYRVVSVLTVLHQDWLHGKEY |
| chain - D | | | KCKVSNKALPAPIEKTISKAKGQPREPQVCTLPPSRDELTKNQVSLSCA |
| (HL1-L1-MM) | | | VKGFYPSDIAVEWESNGQPENNYKTTPPVLDSDGSFFLVSKLTVDKSKW |
| | | | QQGNVFSCSVMHEALHNHYTQKGLSLSPGGPPSGSSFGDSGGFHLTSGG |
| | | | GAVNGTSQFTCFYNSRANISCVWSQDGALQDTSCQVHANPDRRRWNQTC |
| | | | ELLPVSQASWACNLILGAPDSQKLTTVDIVTLRVLCREGVRWRVMAIQD |
| | | | FKPTENLRLMAPISLQVVHVETNRCNISWEISQASHYFERHLEFEARTL |
| | | | SPGHTWEEAPLLTLKQKQEWICLETLTPDTQYEFQVRVKPLQGEFTTWS |
| | | | PWSQPLAFRTKPAALGKD |
| 1^{st} | 42 | AK438 | DKTATCPPCPAPELLGGPSVELEPPKPKDTLMISRTPEVTCVVVDVSHE |
| polypeptide | | | DPEVKENWYVDGVEVANAKTKPREEQYASTYRVVSVLTVLHQDWLNGKE |
| chain - E | | | YKCKVSNKALPAPIEKTISKAKGQPREPQVCTLPPSRDELTKNQVSLSC |
| (MLI-L1-MM) | | | AVKGEYPSDIAVEWESNGGPENNYKTTPPVLDSDGSFELVSKLTVDKSR |
| | | | WQQGNVFSCSVMHEALHNHYTQKSLSLSPGGPPSGSSPGVPLSLYGSGG |
| | | | GAVNGTSQFTCYYNSRANISCVWSQDGALQDTSCQVHAWPDERRRWNQT |
| | | | CELLPVSQASWACNLILGAPDSQKLTTVDIVTLRVLCREGVRWRVMAIQ |
| | | | DFKPFENLRLMAPISLQVVHVETHRCNISWEISQASHYFERHLEFEART |
| | | | LSPGHTWEEAPLLTLKQKQEWICLETLTPDTQYEFQVRVKPLQGEFTTW |
| | | | SPWSQPLAFRTKPAALGKD |
| 1^{st} | 43 | AK471 | DKTHTCPPCPAPELLGGPSVFLFPPKPKDTLMASRTPEVTCVVVDVSHE |
| polypeptide | | | DPEVKFNWYVDGVEVHNAKTKPREEQYASTYRVVSVLTVLHQDWLNGKE |
| chain - G | | | YKCKVSNKALPAPIEKTISKAKGQPREPQVCTLPPSRDELTKNQVSLSC |
| (HL-L2-C) | | | AVKGFYPSDIAVEWESNGQPENNYKTTPPVLDSDGSFFLSKLTVDKSRW |
| | | | QQGNVFSCSVMHEALHNHYTQKSLSLSPGPGSGSAVNGTSQFTCFYNSR |
| | | | ANISCVNSQDGALQDTSCQVHAWPDRRRWNQTCELLPVSQASWACNLIL |
| | | | GAPDSQKLTTVDIVTLRVLCREGVRNRVMAIQDFKPFENLRLMGAPISL |
| | | | QVVHVETHRCNISWEISQASHYFERHLEFEARTLSPGHTWEEAPLLTLK |
| | | | QKQEWICLETLTPDTQYEFQVRVKPLQGEFTTWSPWSQPLAFRTKPAAL |
| | | | GKD |
| 1^{st} | 44 | AK252 | DKTRTCPPCPAPELLGGPSVELEPPKPKDTLMISRTPEVTCVVVDVSHE |
| polypeptide | | | DPEVKFNWYVDGVEVHNAKTKPREEQYASTYRVVSVLTVLHQDWLNGKE |
| chain - H | | | YKCKVSNNALPAPIEKTISKAKGQPREPQVCTLPPSRDELTKNQVSLSC |
| (HL-L2-C) | | | AVKGFYPSDIAVEWESNGQPENNYKTTPPVLDSDGSFFLVSKLTVDKSR |
| | | | WQQGNVFSCSVMHEALHNHYTQKSLSLSPGGPPSGSSPMPYDLYHPSGG |
| | | | GAVNGTSQFTCFYSRANISCVWSQDGALQDTSCQVHAWPDRRRWNQTCE |
| | | | LLPVSQASWACNLILGAPDSQKLTTVDIVTLRVLCREGVRWRVMAIQDF |
| | | | KPFENLRLMAPISLQVVHVETHRCNISWEISQASHYFERHLEFEARTLS |
| | | | PGHTWEEAPLLTLKQKQEWICLETLTPDTQYEFQVRVKPLQGEFTTWSP |
| | | | NSQPLAFRTKPAALGKD |
| 1^{st} | 255 | AK523 | DKTHTCPPCPAPELLGGPSVELFPPKPKDTLMISRTPEVTCVVVDVSRE |
| polypeptide | | | DPEVKFNWYVDGVEVANAKTKPREEQYASTYRVVSVLTVLHQDWLNGKE |
| chain - I | | | YKCKVSNKALPAPIEKTISKAKGQPREPQVCTLPPSRDELTENQVSLSC |
| (HL-L1-2M) | | | AVKGFYPSDIAVEWESNGQPENNYKTTPPVLDSDGSEFLVSKLTVDESR |
| | | | WQCGNVFSCSVMNEALANHYTQKSLSLSPGGSPDLLAVVAASSGPAVNI |
| | | | GTSQFTCFYHSRANISCVWSQDGALCDTSCQVHAWPDRRRWNQTCELLP |
| | | | VSQASWACNLILGAPDSQELTTVDIVTLRVLCREGVRWRVMAIQDFKPF |
| | | | ENLRLMAPISLQVVHVETHRCNISWEISQASHYFERHLEFEARTLSPGH |
| | | | TWEEAPLLTLKQKQEWICLETLTPDTQYEFQVRVKPLQGEFTTWSPWSQ |
| | | | PLAFRTKPAALGKD |
| 1^{st} | 256 | AK524 | DKTHTCPPCPAPELLGGPSVFLFPPKPSDTLMISRTPEVTCVVVDVSHE |
| polypeptide | | | DPEVKFNWYVDGVEVHNAKTKPREEQYASTYRVVSVLTVLHQDWLNGKE |
| chain - J | | | YKCKVSNKALPAPIEKTISKARCQPREPQVCTLPPSRDELTKNQVSLSC |
| (HL-11-2M) | | | AVKGFYPSDIAVEWESNGQPENNYKTTPPVLDSDGSFFLVSKLTVDKSR |
| | | | WQQGNVFSCSVMHEALHNHYTQKSLSLSPGGSPGDLLAVVAASSGPAVN |
| | | | GTSQFTCFYNSRANISCVWSQDGALQDTSCQVHAWPDRRRWNQTCELLP |
| | | | VSGASWACNLILGAPDSQKLTTVDIVTLRVLCREGVRWRVMAIQDFKPF |
| | | | ENLRLMAPISLQVVHVETHRCNISWEISQASHYFERHLEFEARTLSPGH |
| | | | TWEEAPLLTLKQKEWICLETLTPDTQYEFQVRVKPLQGEFTTQSPWSQP |
| | | | LAFRTKPAALGKD |
| 1^{st} | 257 | AK525 | DKTHTCPPCPAPELLGGPSVFLFPPKPKDTLMISRTPEVTCVVVDVSHE |
| polypeptide | | | DPEVKFNWYVDGVEVHNAKTKPREEQYASTYEVYSVLTVLHQDWLNGKE |
| chain - K | | | YKCRVSNEALPAPIEKTISKAKGQPREPQVCTLPPSRDELTKNQVSLSC |
| (HL-L1-MM) | | | AVKGFYPSDIAVEWESNGQPENNYKTTPPVLDSDGSFFLVSKLTVDKSR |
| | | | WQQGNVFSCSVMHEALHNHYTQKSLSLSPGSGSPSDLLAVVAASSGPAV |
| | | | NGTSQFTCFYNSRANISCVNSQDGALQDTSCQVHAWPDRRRWNQTCELL |
| | | | PVSQASWACNLILGAPDSQKLTTVDIVTLRVLCREGVRWRVMAIQDFRP |
| | | | FENLRLMAPISLQVVHTEHRCNISWEISQASHYFERHLEFEARTLSPGH |
| | | | TWEEAPLLTLKQKQEWICLETLTPDTQYEFQVRVKPLQGEFTTWSPWSQ |
| | | | PLAFRTKPAALGKD |
| 2^{nd} | 45 | AK168 | DKTHTCPPCPAPELLGGPSVFLFPPKPKDTLMISRTPEVTCVVVDVSHE |
| polypeptide | | | DPEVKFNWYVDGVEVHNAKTKPREEQYASTYRVVSVLTVLHQDWLNGKE |
| chain - A | | | YKCKVSNKALPAPIEKTISKAKGQPREPQVYTLPPCRDELTKNQVSLWC |
| (HL-L2-C) | | | LVKGFYPSDIAVEWESNGQPENNYKTTPPVLDSDGSFFLYSKLTVDKSR |
| | | | WQQGNVFSCSVMHEALHNHYTQKSLSLSPGGGSSPPMPYDLYHPSGPAP |
| | | | TSSSTKKTQLQLEHLLLDLQMILNGINNYKNPKLTAMLTAKFAMPKKAT |
| | | | ELKHLQCLEEALKPLEEVLNLAQSKNFHLRPRDLISNINVIVLELKGSE |
| | | | TTFMCEYADETATIVEFLNRWITFAQSIISTLT |
| 2^{nd} | 46 | AK191 | DKTHTCPPCPAPELLGGPSVFLFPPKPKDTLMISRTPEVTCVVVDYSHE |
| polypeptide | | | DPEVKFNWYVDGVEVHNAKTKPREEQYASTYRVVSVLTVLHQDWLNGKE |
| chain - B | | | YKCKVSNKALPAPIEKTISRAKGQPREPQVYTLPPCRDELTKNQVSLWC |
| (HL-L2-C) | | | LVKGFYPSDIAVEWESNGQPENNYKTTPPVLDSDGSFFLYSKLTVDKSR |
| | | | WQQGNVFSCSVMHEALHNNYTQKSLSLSPGGGSGRAAAVKSPSGPAPTS |
| | | | SSTKKTQLQLEHLLLDLQMILNGINNYKNPKLTAMLTAKFAMPKKATEL |
| | | | KHLQCLEEALKPLEEVLNLAQSKNFHLRPRDLISNINVIVLELKGSETT |
| | | | FMCEYADETATIVEFLNRWITFAQSIISTLT |
| 2^{nd} | 47 | AK197 | DKTHTCPPCPAPELLGGPSVFLFPPKPKDTLMISRTPEVTCVVVDVSHE |
| polypeptide | | | DPEVKFNWYVDGVEVHNAKTKPREEQYASTYRVVSVLTVLHQDWLNGKE |
| chain - C | | | YKCKVSNKALPAPIEKTISKAKGQPREPQVYTLPPCRDELTKNQVSLWC |
| (HL-L2-C) | | | LVKGFYPSDIAVEWESNGQPENNYKTTPPVLDSDGSFFLYSKLTVDKSR |
| | | | WQQGNVFSCSVMHEALHNHYTQKSLSLSPGGGSGHEQLTVSGPAPTSSS |
| | | | TKKTQLQLEHLLLDLQMLINGINNYKNPKLTAMLTAKFAMPKKATELKH |
| | | | LQCLEEALKPLEEVLNLAQSKNFHLRPRDLISNINVIVLELKGSETTFM |
| | | | CEYADETATIVEFLNRWITFAQSIISTLT |
| 2^{nd} | 48 | AK203 | DKTHTCPPCPAPELLGGPSVFLFPPKPKDTLMISRTPEVTCVVVDVSHE |
| polypeptide | | | DPEVKFNWYVDGVEVHNAKTKPREEQYASTYRVVSVLTVLHQDWLNGKE |
| chain - D | | | YKCKVSNKALPAPIEKTISKAKGQPREPQVYTLPPCRDELTKNQVSLWC |
| (HL-L2-C) | | | LVKGFYPSDIAVEWESNGQPENNYKTTPPVLDSDGSFFLYSKLTVDKSR |
| | | | WQQGNVFSCSVMHEALHNHYTQKSLSLSPGGSGPDSGGFMLTSGPAPTS |
| | | | SSTKKTQLQLEMLLLDLGMILNGINNYKNPKLTAMLTAKFAMPKKATEL |
| | | | KHLQCLEEALKPLEEVLNLAQSKNFHLRPRDLISNINVIVLELKGSETT |
| | | | FMCEYADETATIVEFLNRWITFAQSIISTLT |
| 2^{nd} | 49 | AK209 | DKTHTCPPCPAPELLGGPSVFLFPPKPKDTLMISRTPEVTCVVVDVSHE |
| polypeptide | | AK341 | DPEVKFNWYVDGVEVHNAKTKPREEQYASTYRVVSVLTVLHQDWLNGKE |
| chain - E | | | YKCKVSNKALPAPIERTISKAKGQPREPQVYTLPPCRDELTKNQVSLWC |
| (HL-L2-C) | | | LVKGFYPSDIAVEWESNGQPENNYKTTPPVLDSDGSFFLYSKLTVDKSR |
| | | | WQQGNVFSCSVMHEALHNHYTQKSLSLSPGGSPGVPLSLYSGPAPTSSS |
| | | | TRKTQLQLEHLLLDLQMILNGINNYKNPKLTAMLTAKFAMPKKATELKH |
| | | | LQCLEEALKPLEEVLNLAQSKNFHLRPRDLISNINVIVLELKGSETTFM |
| | | | CEYADETATIVEFLNRWITFAQSIISTLT |
| 2^{nd} | 50 | AK471 | DKTHTCPPCPAPELLGGPSVFLFPPKPKDTLMASRTPEVTCVVVDVSHE |
| polypeptide | | | DPEVKFNWYVDGVEVHNAKTKPREEQYASTYRVVSVLTVLHQDWLNGKE |
| chain - F | | | YKCKVSNKALPAPIEKTISKAKGQPREPQVYTLPPCRDELTKNQVSLWC |
| (HL-L2-C) | | | LVKGFYPSDIAVEWESNGOPENNYKTTPPVLDSDGSFFLYSKLTVDRSR |
| | | | WQQGNVFSCSVMHEALHNHYTQKSLSLSPGGSPGVPLSLYSGPAPTSSS |
| | | | TKKTQLQLEHLLLDLQMILNGINNYKNPKLTAMLTAKFAMPKKATELKH |
| | | | LQCLEEALKPLEEVLNLAQSKNFHLRPRDLISNINVIVLELRGSETTFM |
| | | | CEYADETATIVEFLNRWITFAQSIISTLT |
| 2^{nd} | 51 | AK442 | DKTHTCPPCPAPELLGGPSVFLFPPKPKDTLMISRTPEVTCVVVDVSHE |
| polypeptide | | AK438 | DPEVKFNWYVDGVEVHNAKTKPREEQYASTYRVVSVLTVLHQDWLNGKE |
| chain - G | | AK530 | YKCKVSNKALPAPIEKTISKAKGQPREPQVYTLPPCRDELTKSQVSLWC |
| (HL-L2-C) | | AK252 | LVKGFYPSDIAVEWESNGQPENNYKTTPPVLDSDGSFFLYSKLTVDKSR |
| | | AK523 | WQQGNVFSCSVMHEALHNHYTQKSLSLSPGGGSSPPGGGSSGGGSGPAP |
| | | AK524 | TSSSTKKTQLQLEHLLLDLQMILNGINNYKNTKLTAMLTAKFAMPKKAT |
| | | AK525 | ELKHLQCLEEALKPLEEVLNLAQSKNFHLRPRDLISNINVIVLELKGSE |
| | | | TTFMCEYADETATIVEFLNRWITFAQSIISTLT |
| 2^{nd} | 258 | AK539 | DKTHTCPPCPAPELLGGPSVFLFPPKPKDTLMISRTPEVTCVCCDVSHE |
| polypeptide | | | DPEVKFNWYVDGVEVHNAKTKPREEQYASTYRVVSVLTVLHQDWLNGKE |
| chain - H | | | YCKVSNKALPAPIEKTISKAKGQPREPQVYTLPPCRDELTKNQVSLWCL |
| (HL-L2-C) | | | VKGFYPSDIAVEWESNGQPENNYKTTPPVLDSDGSFFLYSKLTVDRSRW |
| | | | QQGNVFSCSVMHEALHNHYTQKSLSLSPGGGPSDLLAVVAASSGPAPTS |
| | | | SSTKKTQLQLEHLLLDLQMILNGINNYKNPKLTAMLTAKFAMPKKATEL |
| | | | KHLQCLEEALKPLEEVLNLAQSKNFHLRPRDLISNINVIVLELKGSETT |
| | | | FMCEYADETATIVEFLNRWITFAQSIISTL |
| 2^{nd} | 259 | AK540 | DKTHTCPPCPAPELLGGPSVFLFPPKPKDTLMISRTPEVTCVVVDVSHE |
| polypeptide | | | DPEVKFNWYVDGVEVHNAKTKPREEQYASTYRVVSVLTVLHQDWLNGKE |
| chain - H | | | YKCKVSNKALPAPIEKTISKAKGQPREPQVYTLPPCRDELTKNQVSLWC |
| (HL-L2-C) | | | LVKGFYPSDIAVEWESNGQPENNYKTTPPVLDSDGSFFLYSKLTVDKSR |
| | | | WQQGNVFSCSVMHEALHNHYTQKSLSLSPGGSGPSDLLAVVAASSGPAP |
| | | | TSSSTKKTQLQLEHLLLDLQMILNGINNYKNPRLTAMLTAKFAMPKKAT |
| | | | ELKHLQCLEEALKPLEEVLNLAQSKNFHLRPRDLISNINVIVLELKGSE |
| | | | TTFMCEYADETATIVEFLNRWITPAQSIISTLT |
| 2^{nd} | 260 | AK541 | DKTHTCPPCPAPELLGGPSVFLFPPKPKDTLMISRTPEVTCVVVDVSHE |
| polypeptide | | | DPEVKFNWYVDGVEVHNAKTKPREEQYASTYRWVSVLTVLHQDWLNGKE |
| chain - H | | | YKCKVSNKALPAPIEKTISKAKGQPREPQVYTLPPCRDELTKNQVSLWC |
| (HL-12-c) | | | LVKGFYPSDIAVEWESNGQPENNYKTTPPVLDSDGSFFLYSKLTVDKSR |
| | | | WQQGNVFSCSVMHEALHNHYTQKSLSLSPGGSSGGFDLLAVVAASSGPA |
| | | | PTSSSTKKTQLQLEHLLLDLQMILNGINNYKNPKLTAMLTAKFAMPKKA |
| | | | TELKHLGCLEEALKPLEEVLSLAQSKNTHLRPRDLISNINVIVLELKGS |
| | | | ETTFMCEYADETATIVEFLNRWITFAQSIISTLT |
| Cleavage | 52 | AK168 | LYHPSGPAPTSSSTKKTQLQLEHLLLDLQMILNGINNYKNPKLTAMLTA |
| product | | | KFAMPKKATELKHLQCLEEALKPLEEVLNLAQSKNFHLRPADLISNINV |
| CP | | | IVLELKGSETTFMCEYADETATIVEFLNRWITFAQSIISTLT |
| Cleavage | 53 | AK191 | VKSPSGPAPTSSSTKKTQLQLEHLLLDLQMILSGINNYKNPKLTAMLTA |
| product | | | KFAMPKKATELKHLQCLEEALKPLEEVLNLAQSKNFHLRPRDLISNINV |
| CP | | | IVLELKGSETTTMCEYADETATIVEFLNRWITFAQSIISTLT |
| Cleavage | 54 | AK197 | LYVSGPAPTSSSTKKTQLQLEHLLLDLQMILNGINNYKNPKLTAMLTAK |
| produCt | | | FAMPKKATELKHLQCLEEALKPLEEVLNLAQSKNFHLRPRDLISNINVI |
| CP | | | VLELKGSETTFMCEYADETATIVEFLNRWITFAQSIISTLT |
| Cleavage | 55 | AK203 | FMLTSGPAPTSSSTKKTQLQLEHLLLDLQMILNGINNYKNPKLTAMLTA |
| produCt | | | KFAMPKKATELKHLQCLEEALKPLEEVLNLAQSKNFHLRPRDLISNINV |
| CP | | | IVLELKGSETTFMCEYADETATIVEFLNRWITFAQSIISTLT |
| Cleavage | 56 | AK209 | LYSGPAPTSSSTKKTQLOLEHLLLDLQMILNSGINNYKNPKLTAMLTAK |
| product | | AK341 | FAMPKKATELKHLQCLEEALKPLEEVLNLAQSKNFHLRPRDLISNINVI |
| CP | | AK471 | VLELKGSETTFMCEYADETATIVEFLARWITFAQSIISTLT |
| Cleavage | 57 | AK442 | DKTHTCPPCPAPELLGGPSVELFPPKPEDTLMISRTPEVTCVVVDVSHE |
| product | | | DPEVKFNWYVDGVEVHNAKTKPREEQYASTYRVVSVLTVLHQDSLSGKE |
| CP | | | YKCKVSNSALPAPIEKTLSKAKCQPREPQVYTLPPCRDELTKNGVSLWC |
| | | | LVKGFYPSDIAVEWESNGQPENNYKTTPPVLDSDGSFFLYSKLTVDKSR |
| | | | WQQGNVFSCSVMHEALRNRYTOKSLSLSPGGGSSPPGGGSSGGGSGPAP |
| | | | TSSSTKKTQLQLEHLLLDLQMILNGINNYKNPKLTAMLTARFAMPKKAT |
| | | | ELKHLQCLEEALKPLEEVLNLAQSKNFALRPRDLISNINVIVLELKGSE |
| | | | TTFMCEYADETATIVEFLNRWITFAQSIISTLT; (2^{nd} |
| | | | polypeptide chain - SEQ ID NO: 265) |
| | | | DKTHTCPPCPAPELLGGPSVFLFPPKPKDTLMISRTPEVTCVVVDVSHE |
| | | | DPEVKFNWYVDGVEVHNAKTKPREEQYASTYRVVSVLTVLHQDWLNGKE |
| | | | YKCKVSNKALPAPIEKTTSKAKGQPREPQVCTLPPSRDELTKNQVSLSC |
| | | | AVKGFYPSDIAVEWESNGQPENNYKTTPPVLDSDGSFFLVSKLTVDKSR |
| | | | WQQGNVFSCSVMNEALHNHYTQKSLSLSPGGPPSGSSPGDSGG (1^{st} |
| | | | polypeptide chain - SEQ ID NO: 266) |
| Cleavage | 58 | AK438 | DKTHTCPPCPAPELLGGPSVFLFPPKPKDTLMISRTPEVTCVVVDVSHE |
| product | | | DPEVKFNWYVDGVEVHNAKTKPREEQYASTYRVVSVLTVLHQDWLNGKE |
| CP | | | YKCKVSNKALPAPIEKTISKAKGQPREPQVYTLPPCEDELTKNQVSLWC |
| | | | LVKGFYPSDIAVEWESNGQPENNYKTTPPVLDSDGSFFLYSKLTVDKSR |
| | | | WQQGNVFSCSVMHEALHNHYTQKSLSLSPGGGSSPPGGGSSGGGSGPAP |
| | | | TSSSTKKTQLQLEHLLLDLQMILNGINNYKNFKLTAMLTAKFAMPKKAT |
| | | | ELKHLQCLEEALKPLEEVLNLAQSKNTHLRPRDLISNINVIVLELKGSE |
| | | | TTEMCEYADETATIVEFLNRWITFAQSIISTLT; (2^{nd} |
| | | | polypeptide chain - SEQ ID NO: 267) |
| | | | DKTHTCPPCPAPELLGGRSVFLFPPKPKDTLMISRTPEVTCVVVDVSHE |
| | | | DPEVKFNWYVDGVEVHNAKTKPREEQYASTYRVVSVLTVLHQDWLNGKE |
| | | | YKCKVSNKALPAPIEKTISKAKGQPREPQVCTLPPSRDELTKNQVSLSC |
| | | | AVKGFYPSDIAVEWESNGQPENNYKTTPPVLDSDGSFFLVSKLTVDKSR |
| | | | WQQGNVFSCSVMHEALHNHYTQKSLSLSPGSPPSGSSPGVPLS (1^{st} |
| | | | polypeptide chain - SEQ ID NO: 268) |
| Cleavage | 59 | AK530 | DKTHTCPPCPAPELLGGPSVFLFPPKPKDTLMISRTPEVTCVVVDVSHE |
| product | | | DPEVKFNWYVDGVEVHNAKTKPREEQYASTYRVVSVLTVLHQDWLNGKE |
| CP | | | YKCKVSNKALPAPIEKTISKAKGQPREPQVYTLPPCRDELTKNQVSLWC |
| | | | LVKGFYPSDIAVEWESNGQPENNYKTTPPVLDSDGSFFLYSKLTVDKSR |
| | | | WQQGNVFSCSVMHEALHNHYTQKSLSLSFGGGSSPPGGGSSGGGSGPAP |
| | | | TSSSTKKTQLQLEHLLLDLGMILNGINNYKNPKLTAMLTAKFAMPKKAT |
| | | | ELKHLQCLEEALKPLEEVLNLAQSKNFHLRPRDLISNINVIVLELKGSE |
| | | | TTFMCEYADETATIVEFLKRWITFAQSIISTLT; (2^{nd} |
| | | | polypeptide chain - SEQ ID NO: 269) |
| | | | DKTHTCPPCPAPELLGGPSVFLFPPKPKDTLMISRTPEVTCVVVDVSHE |
| | | | DPEVKFNWYVDGVEVHNAKTKPREEQYASTYRVVSVLTVLHQDWLNGKE |
| | | | YKCKVSNKALPAPIEKTISKAKGQPREPQVCTLPPSRDELTKNQVSLSC |
| | | | AVKGFYPSDIAVEWESNGQPENNYKTTPPVLDSDGSFFLVSKLTVDKSR |
| | | | WQQGNVFSCSVMHEALHNHYTQKSLSLSPGGPPSGSSPMPYD (1^{st} |
| | | | polypeptide chain - SEQ ID NO: 270) |
| Cleavage | 261 | AK539 | VVAASSGPAPTSSSTKKTQLQLEHLLLDLQMILKGINNYKNPKLTAMLT |
| product | | AK540 | AKFAMPKKATELKHLQCLEEALKPLEEVLNLAQSKHFHLRPRDLISNIN |
| CP | | AK541 | VIVLELKGSETTFMCEYADETATIVEFLNRWITFAQSIISTLT |
| Cleavage | 262 | AK523 | DKTHTCPPCPAPELLGGPSVFLFPPKPKDTLMISRTPEVTCVVVDVSHE |
| product | | | DPEVKFNWYVDGVEVHNAKTKPREEQYASTYRVVSVLTVLHQDWLNGKE |
| CP | | | YKCKVSNKALPAPIEKTISKAKGQPREPQVYTLPPCRDELTKNQVSLMC |
| | | | LVKGFYPSDIAVEWESNGQPENNYKTTPPVLDSDGSFFLYSKLTVDKSR |
| | | | WQQGNVFSCSVMHEALHNHYTQKSLSLSPGGGSSPPGGGSSGGGSGPAP |
| | | | TSSSTKKTQLQLEHLLLDLQMILNGINNYKNPKLTAMLTAKFAMPKKAT |
| | | | ELKHLQCLEEALKPLEEVLNLAQSKNFHLRPRDLISNINVIVLELKGSE |
| | | | TTFMCEYADETATIVEFLNRWITFAQSIISTLT (2^{nd} |
| | | | polypeptide chain - SEQ ID NO: 271) |
| | | | DKTHTCPPCPAPELLGGPSVFLFPPKPKDTLMISRTPEVTCVVVDVSHE |
| | | | DPEVKFNWYVDGVEVHNAKTKPREEQYASTYRVVSVLTVLHQDWLNGKE |
| | | | YKCKVSNKALPAPIEKTISKAKGQPREPQVCTLPPSRDELTKNQVSLSC |
| | | | AVKGFYPSDIAVEWESNGQPENNYKTTPPVLDSDGSFFLVSKLTVDKSR |
| | | | WQQGNVFSCSVMHEALHNHYTQKSLSLSPGGSDLLA (1^{st} |
| | | | polypeptide chain- - SEQ ID NO: 272) |
| Cleavage | 263 | AK524 | DKTHTCPPCPAPELLGGPSVFLFPPKPKDTLMISRTPEVTCVVVDVSHE |
| product | | | DPEVKFNWYVDGVEVHNAKTKPREEQYASTYRVVSVLTVLHQDWLNGKE |
| CP | | | YKCKVSNKALPAPIEKTISEAEGQPREPQVYTLPPCRDELTKNQVSLWC |
| | | | LVKGFYPSDIAVEWESEGQPENNYKTTPPVLDSDGSFFLYSKLTVDKSR |
| | | | WQQGNVFSCSVMHEALHNHYTQKSLSLSFGGGSSPPGGGSSGGGSGPAP |
| | | | TSSSTKKTQLQLEHLLLDLQMILNGINNYKNPKLTAMLTAKFAMPKKAT |
| | | | ELKHLQCLEEALKPLEEVLNLAQSKNFHLRPRDLISNINVIVLELKGSE |
| | | | TTFMCEYADETATIVEFLNRWITFAQSIISTLT (2^{nd} polypeptide |
| | | | chain - SEQ ID NO: 273) |
| | | | DKTHTCPPCPAPELLGGPSVFLFPPKPKDTLMISRTPEVTCVVVDVSHE |
| | | | DPEVKFNWYVDGVEVHNAKTKPREEQYASTYRVVSVLTVLHQDWLNGKE |
| | | | YKCKVSNKALPAPIEKTISKAKGQPREPQVCTLPPSRDELTKNQVSLSC |
| | | | AVKGFYPSDIAVEWESNGGPENNYKTTPPVLDSDGSFFLVSKLTVDKSR |
| | | | WQQGNVPSCSVMHEALHNHYTQKSLSLSPGGSPGDLLA(1^{st} |
| | | | polypeptide chain - SEQ ID NO: 274) |
| Cleavage | 264 | AK525 | DKTHTCPPCPAPELLGGPSVFLFPPKPKDTLMISRTPEVTCVVVDVSHE |
| product | | | DPEVKFNWYVDGVEVHNAKTKPREEQYASTYRVVSVLTVLHQDWLNGKE |
| CP | | | YKCKVSNKALPAPIEKTISKAKGQPREPQVYTLPPCRDELTKNQVSLWC |
| | | | LVKGFYPSDIAVEWESNGQPENNYKTTPPVLDSDGSFFLYSKLTVDKSR |
| | | | WQQGNVFSCSVMHEALHNHYTQKSLSLSPGGGSSPPGGGSSGGGSGPAP |
| | | | TSSSTKKTQLQLEHLLLDLQMILNGINNYKNPKLTAMLTAKFAMPKKAT |
| | | | ELKHLQCLEEALKPLEEVLNLAQSKNFHLRPRDLISNINVIVLELKGSE |
| | | | TTFMCEYADETATIVEFLNRWITFAQSIISTLT (2^{nd} |
| | | | polypeptide chain - SEQ ID NO: 275) |
| | | | DKTHTCPPCPAPELLGGPSVFLFPPKPKDTLMISRTPEVTCVVVDVSHE |
| | | | DFEVKFNWYVDGVEVHNAKTKPREEQYASTYRVVSVLTVLHQDWLNGKE |
| | | | YKCKVSNKALPAPIEKTISKAKGQPREPQVCTLPPSRDELTKNQVSLSC |
| | | | AVKGFYPSDIAVEWESNGQPENNYKTTPPVLDSDGSFFLVSKLTVDKSR |
| | | | WQQGNVFSCSVMHEALHNHYTQKSLSLSPGGSGSPSDLLA (1^{st} |
| | | | polypeptide chain - SEQ ID NO: 276} |

### 10.1 Other Sequences:

| | SEQ | |
|---|---|---|
| | ID | |
| DESCRIPTION | NO | SEQUENCE |
| MM1 | 60 | ELCDDDPPEIPHATFKAMAYKEGTMLNCECKRGFRRIKSGSLYMLCTGNSSHSSWDNQC |
| | | QCTSSATRNTTKQVTPQPEEQKERKTTEMQSPMQPVDQASLPGHCREPPPWENEATERIY |
| | | HFVVGQMVYYQCVQGYRALHRGPAESVCKMTHGKTRWTQPQLICT |
| Linker L1 | 61 | PA |
| IL-2 | 62 | APTSSSTKKTQLQLEHLLLDLQMILNGINNYKNPKLTRMLTFKFYMPKKATELKHLQCLE |
| domain | | EELKPLEEVLNLAQSKNFHLRPRDLISNINVIVLELKGSETTFMCEYADETATIVEFLNRWI |
| | | TFAQSIISTLT |
| Linker L2 | 63 | GGGGGGGGGGGGGGGGGGGGGGGGGGGGGGGGGGG |
| MM2 | 64 | AVNGTSQFTCFYNSRANISCVWSQDGALQDTSCQVHAWPDRRRWNQTCELLPVSQASW |
| | | ACNLILGAPDSQKLTTVDIVTLRVLCREGVRWRVMAIQDFKPFENLRLMAPISLQVVHVE |
| | | THRCNISWEISQASHYFERHLEFEARTLSPGHTWEEAPLLTLKQKQEWICLETLTPDTQYE |
| | | FQVRVKPLQ |
| HL | 65 | DKTHTCPPCPAPELLGGPSVFLFPPKPKDTLMISRTPEVTCVVVDVSHEDPEVKFNWYVD |
| | | GVEVHNAKTKPREEQYASTYRVVSVLTVLHQDWLNGKEYKCKVSNKALPAPIEKTISKA |
| | | KGQPREPQVYTLPPSRDELTKNQVSLTCLVKGFYPSDIAVEWESNGQPENNYKTTPPVLD |
| | | SDGSFFLYSKLTVDKSRWQQGNVFSCSVMHEALHNHYTQKSLSLSPG |
| Polypeptide | 66 | DKTHTCPPCPAPELLGGPSVFLFPPKPKDTLMISRTPEVTCVVVDVSHEDPEVKFNWYVD |
| chain | | GVEVHNAKTKPREEQYASTYRVVSVLTVLHQDWLNGKEYKCKVSNKALPAPIEKTISKA |
| | | KGQPREPQVYTLPPSRDELTKNQVSLTCLVKGFYPSDIAVEWESNGQPENNYKTTPPVLD |
| | | SDGSFFLYSKLTVDKSRWQQGNVFSCSVMHEALHNHYTQKSLSLSPGPAELCDDDPPEIP |
| | | HATFKAMAYKEGTMLNCECKRGFRRIKSGSLYMLCTGNSSHSSWDNQCQCTSSATRNTT |
| | | KQVTPQPEEQKERKTTEMQSPMQPVDQASLPGHCREPPPWENEATERIYHFVVGQMVYY |
| | | QCVQGYRALHRGPAESVCKMTHGKTRWTQPQLICTGGGGGGGGGGGGGGGGGGGGGGGG |
| | | GGGGGGGGGGGAPTSSSTKKTQLQLEHLLLDLQMILNGINNYKNPKLTRMLTFKFYMPK |
| | | AKTELKHLQCLEEELKPLEEVLNLAQSKNFHLRPRDLISNINVIVLELKGSETTFMCE |
| | | YADETATIVEFLNRWITFAQSIISTLTGPPSGSSPMPYDLYHPSGGGAVNGTSQFTCFYN |
| | | ASRNISCVWSQDGALQDTSCQVHAWPDRRRWNQTCELLPVSQASWACNLILGAPDSQKLT |
| | | TVDIVTLRVLCREGVRWRVMAIQDFKPFENLRLMAPISLQWHVETHRCNISWEISQASH |
| | | YFERHLEFEARTLSPGHTWEEAPLLTLKQKQEWICLETLTPDTQYEFQVRVKPLQ |
| Polypeptide | 67 | DKTHTCPPCPAPELLGGPSVFLFPPKPKDTLMISRTPEVTCVVVDVSHEDPEVKFNWYVD |
| chain | | GVEVHNAKTKPREEQYASTYRVVSVLTVLHQDWLNGKEYKCKVSNKALPAPIEKTISKA |
| | | KGQPREPQVYTLPPSRDELTKNQVSLTCLVKGFYPSDIAVEWESNGQPENNYKTTPPVLD |
| | | SDGSFFLYSKLTVDKSRWQQGNVFSCSVMHEALHNHYTQKSLSLSPGAPTSSSTKKTQLQ |
| | | LEHLLLDLQMILNGINNYKNPKLTRMLTFKFYMPKKATELKHLQCLEEELKPLEEVLNLA |
| | | QSKNFHLRPRDLISNINVIVLELKGSETTFMCEYADETATIVEFLNRWITFAQSIISTLT |
| Polypeptide | 68 | DKTHTCPPCPAPELLGGPSVFLFPPKPKDTLMISRTPEVTCVVVDVSHEDPEVKFNWYVD |
| chain | | GVEVHNAKTKPREEQYASTYRVVSVLTVLHQDWLNGKEYKCKVSNKALPAPIEKTISKA |
| | | KGQPREPQVYTLPPSRDELTKNQVSLTCLVKGFYPSDIAVEWESNGQPENNYKTTPPVLD |
| | | SDGSFFLYSKLTVDKSRWQQGNVFSCSVMHEALHNHYTQKSLSLSPGAPTSSSTKKTQLQ |
| | | LEHLLLDLQMILNGINNYKNPKLTAMLTAKFAMPKKATELKHLQCLEEALKPLEEVLNL |
| | | AQSKNFHLRPRDLISNINVIVLELKGSETTFMCEYADETATIVEFLNRWITFAQSIISTLT |
| IL-2 | 69 | APTSSSTKKTQLQLEHLLLDLQMILNGINNYKNPKLTRMLTFKFYMPKKATELKHLQCLE |
| domain | | ERLKPLEEVLNLAQSKNFHLRPRDLISNINVIVLELKGSETTFMCEYADETATIVEFLNRWI |
| | | TFAQSIISTLT |
| IL-2 | 70 | APTSSSTKKTQLQLEHLLLDLQMILNGINNYKNPKLTRMLTEKFYMPKKATELKHLQCLE |
| domain | | EELKPLEEVLNLAQSKNFHLRPRDLISNINVIVLELKGSETTFMCEYADETATIVEFLNRWI |
| | | TFAQSIISTLT |
| IL-2 | 71 | APTSSSTKKTQLQLEHLLLDLQMILNGINNYKNPKLTRMLTFKFYMPKKATELKHLQCLE |
| domain | | FSLKPLFFVLNLAQSKNFHLRPRDLISNINVIVLFLKGSETTFMCFYADFTATIVFFLNRWI |
| | | TFAQSIISTLT |
| IL-2 | 72 | APTSSSTKKTQLQLEHLLLDLQMILNGINNYKNPKLTRMLTAKFYMPKKATELKHLQCLE |
| domain | | EELKPLEEVLNLAQSKNFHLRPRDLISNINVIVLELKGSETTFMCEYADETATIVEFLNRWI |
| | | TFAQSIISTLT |
| IL-2 | 73 | APTSSSTKKTQLQLEHLLLDLQMILNGINNYKNPKLTRMLTFKFRMPKKATELKHLQCLE |
| domain | | EELKPLEEVLNLAQSKNFHLRPRDLISNINVIVLELKGSETTFMCEYADETATIVEFLNRWI |
| | | TFAQSIISTLT |
| IL-2 | 74 | APTSSSTKKTQLQLEHLLLDLQMILNGINNYKNPKLTRMLTSKFYMPKKATELKHLQCLE |
| domain | | ESLKPLEEVLNLAQSKNFHLRPRDLISNINVIVLELKGSETTFMCEYADETATIVEFLNRWI |
| | | TFAQSIISTLT |
| Linker L1 | 75 | PGSG |
| Linker L1 | 76 | GGSSPPRAAAVKSPSGP |
| Linker L1 | 77 | GGPGGPRAAAVKSPSGP |
| Linker L1 | 78 | GSPGVPLSLYSGP |
| HL | 79 | DKTHTCPPCPAPELLGGPSVFLFPPKPKDTLMISRTPEVTCVVVDVSHEDPEVKFNWYVD |
| | | GVEVHNAKTKPREEQYASTYRVVSVLTVLHQDWLNGKEYKCKVSNKALPAPIEKTISKA |
| | | KGQPREPQVCTLPPSRDELTKNQVSLSCAVKGFYPSDIAVEWESNGQPENNYKTTPPVLD |
| | | SDGSFFLVSKLTVDKSRWQQGNVFSCSVMHEALHNHYTQKSLSLSPGK |
| HL | 80 | DKTHTCPPCPAPELLGGPSVFLFPPKPKDTLMISRTPEVTCVVVDVSHEDPEVKFNWYVD |
| | | GVEVHNAKTKPREEQYASTYRVVSVLTVLHQDWLNGKEYKCKVSNKALPAPIEKTISKA |
| | | KGQPREPQVYTLPPCRKELTKNQVSLWCLVKGFYPSDIAVEWESNGQPENNYKTTPPVL |
| | | KSDGSFFLYSKLTVDKSRWQQGNVFSCSVMHEALHNHYTQKSLSLSPG |
| HL | 81 | DKTHTCPPCPAPELLGGPSVFLFPPKPKDTLMISRTPEVTCVVVDVSHEDPEVKFNWYVD |
| | | GVEVHNAKTKPREEQYASTYRVVSVLTVLHQDWLNGKEYKCKVSNKALPAPIEKTISKA |
| | | KGQPREPQVCTLPPSRDELTKNQVSLSCAVKGFYPSDIAVEWESNGQPENNYDTTPPVLD |
| | | SDGSFFLVSDLTVDKSRWQQGNVFSCSVMHEALHNHYTQKSLSLSPG |
| HL | 82 | DKTHTCPPCPAPELLGGPSVFLFPPKPKDTLMISRTPEVTCVVVDVSHEDPEVKFNWYVD |
| | | GVEVHNAKTKPREEQYASTYRVVSVLTVLHQDWLNGKEYKCKVSNKALPAPIEKTISKA |
| | | KGQPREPQVYTLPPCRKKLTKNQVSLWCLVKGFYPSDIAVEWESNGQPENNYKTTPPVL |
| | | DS DGS FFLYSKLTVDKSRWQQGNVFSC SVMHEALHNHYTQKSLSLSPG |
| HL | 83 | DKTHTCPPCPAPELLGGPSVFLFPPKPKDTLMISRTPEVTCVVVDVSHEDPEVKFNWYVD |
| | | GVEVHNAKTKPREEQYASTYRVVSVLTVLHQDWLNGKEYKCKVSNKALPAPIEKTISKA |
| | | KGQPREPQVCTLPPSRDELTKNQVSLSCAVEGFYPSDIAVEWESNGQPENNYKTTPPVLD |
| | | SDGSFFLVSKLTVDKSRWQQGNVFSCSVMHEALHNHYTQESLSLSPG |
| HL | 84 | DKTHTCPPCPAPELLGGPSVFLFPPKPKDTLMISRTPEVTCVVVDVSHEDPEVKFNWYVD |
| | | GVEVHNAKTKPREEQYASTYRVVSVLTVLHQDWLNGKEYKCKVSNKALPAPIEKTISKA |
| | | KGQPREPQVYTLPPCRKKLTKNQVSLWCLVKGFYPSDIAVEWESNGQPENNYKTTPPVL |
| | | DSDGSFFLYSKLTVDKSRWQQGNVFSCSVMHEALHNHYTQKSLSLSPGK |
| Polypeptide | 85 | DKTHTCPPCPAPELLGGPSVFLFPPKPKDTLMISRTPEVTCVVVDVSHEDPEVKFNWYVD |
| chain | | GVEVHNAKTKPREEQYASTYRVVSVLTVLHQDWLNGKEYKCKVSNKALPAPIEKTISKA |
| | | KGQPREPQVYTLPPCRDELTKNQVSLWCLVKGFYPSDIAVEWESNGQPENNYKTTPPVL |
| | | DSDGSFFLYSKLTVDKSRWQQGNVFSCSVMHEALHNHYTQKSLSLSPGGGSSPPMPYDL |
| | | YHPSGPAPTSSSTKKTQLQLEHLLLDLQMILNGINNYKNPKLTRMLTFKFYMPKKATELK |
| | | HLQCLEEELKPLEEVLNLAQSKNFHLRPRDLISNINVIVLELKGSETTFMCEYADETATIVE |
| | | FLNRWITFAQSIISTLT |
| Polypeptide | 86 | DKTHTCPPCPAPELLGGPSVFLFPPKPKDTLMISRTPEVTCVVVDVSHEDPEVKFNWYVD |
| chain | | GVEVHNAKTKPREEQYASTYRVVSVLTVLHQDWLNGKEYKCKVSNKALPAPIEKTISKA |
| | | KGQPREPQVYTLPPCRKELTKNQVSLWCLVKGFYPSDIAVEWESNGQPENNYKTTPPVL |
| | | KSDGSFFLYSKLTVDKSRWQQGNVFSCSVMHEALHNHYTQKSLSLSPGGPPSGSSPMPY |
| | | DLYHPSGGGAVNGTSQFTCFYNSRANISCVVVSQDGALQDTSCQVHAWPDRRRWNQTCE |
| | | LLPVSQASWACNLILGAPDSQKLTTVDIVTLRVLCREGVRWRVMAIQDFKPFENLRLMAP |
| | | ISLQVVHVETHRCNISWEISQASHYFERHLEFEARTLSPGHTWEEAPLLTLKQKQEWICLE |
| | | TLTPDTQYEFQVRVKPLQGEFTTWSPWSQPLAFRTKPAALGKD |
| Polypeptide | 87 | DKTHTCPPCPAPELLGGPSVFLFPPKPKDTLMISRTPEVTCVVVDVSHEDPEVKFNWYVD |
| chain | | GVEVHNAKTKPREEQYASTYRVVSVLTVLHQDWLNGKEYKCKVSNKALPAPIEKTISKA |
| | | KGQPREPQVCTLPPSRDELTKNQVSLSCAVKGFYPSDIAVEWESNGQPENNYDTTPPVLD |
| | | SDGSFFLVSDLTVDKSRWQQGNVFSCSVMHEALHNHYTQKSLSLSPGAPTSSSTKKTQLQ |
| | | LEHLLLDLQMILNGINNYKNPKLTRMLTFKFYMPKKATELKHLQCLEEELKPLEEVLNLA |
| | | QSKNFHLRPRDLISNINVIVLELKGSETTFMCEYADETATIVEFLNRWITFAQSIISTLT |
| Polypeptide | 88 | DKTHTCPPCPAPELLGGPSVFLFPPKPKDTLMISRTPEVTCVVVDVSHEDPEVKFNWYVD |
| chain | | GVEVHNAKTKPREEQYASTYRVVSVLTVLHQDWLNGKEYKCKVSNKALPAPIEKTISKA |
| | | KGQPREPQVYTLPPCRKKLTKNQVSLWCLVKGFYPSDIAVEWESNGQPENNYKTTPPVL |
| | | DSDGSFFLYSKLTVDKSRWQQGNVFSCSVMHEALHNHYTQKSLSLSPGGPPSGSSPMPY |
| | | DLYHPSGGGAVNGTSQFTCFYNSRANISCVVVSQDGALQDTSCQVHAWPDRRRWNQTCE |
| | | LLPVSQASWACNLILGAPDSQKLTTVDIVTLRVLCREGVRWRVMAIQDFKPFENLRLMAP |
| | | ISLQWHVETHRCNISWEISQASHYFERHLEFEARTLSPGHTWEEAPLLTLKQKQEWICLE |
| | | TLTPDTQYEFQVRVKPLQGEFTTWSPWSQPLAFRTKPAALGKD |
| Polypeptide | 89 | DKTHTCPPCPAPELLGGPSVFLFPPKPKDTLMISRTPEVTCVVVDVSHEDPEVKFNWYVD |
| chain | | GVEVHNAKTKPREEQYASTYRVVSVLTVLHQDWLNGKEYKCKVSNKALPAPIEKTISKA |
| | | KGQPREPQVCTLPPSRDELTKNQVSLSCAVEGFYPSDIAVEWESNGQPENNYKTTPPVLD |
| | | SDGSFFLVSKLTVDKSRWQQGNVFSCSVMHEALHNHYTQESLSLSPGAPTSSSTKKTQLQ |
| | | LEHLLLDLQMILNGINNYKNPKLTRMLTFKFYMPKKATELKHLQCLEEELKPLEEVLNLA |
| | | QSKNFHLRPRDLISNINVIVLELKGSETTFMCEYADETATIVEFLNRWITFAQSIISTLT |
| Polypeptide | 90 | DKTHTCPPCPAPELLGGPSVFLFPPKPKDTLMISRTPEVTCVVVDVSHEDPEVKFNWYVD |
| chain | | GVEVHNAKTKPREEQYASTYRVVSVLTVLHQDWLNGKEYKCKVSNKALPAPIEKTISKA |
| | | KGQPREPQVCTLPPSRDELTKNQVSLSCAVEGFYPSDIAVEWESNGQPENNYKTTPPVLD |
| | | SDGSFFLVSKLTVDKSRWQQGNVFSCSVMHEALHNHYTQESLSLSPGGGSSPPMPYDLY |
| | | HPSGPAPTSSSTKKTQLQLEHLLLDLQMILNGINNYKNPKLTRMLTFKFYMPKKATELKH |
| | | LQCLEEELKPLEEVLNLAQSKNFHLRPRDLISNINVIVLELKGSETTFMCEYADETATIV |
| | | EFLNRWITFAQSIISTLT |
| Polypeptide | 91 | DKTHTCPPCPAPELLGGPSVFLFPPKPKDTLMISRTPEVTCVVVDVSHEDPEVKFNWYVD |
| chain | | GVEVHNAKTKPREEQYASTYRVVSVLTVLHQDWLNGKEYKCKVSNKALPAPIEKTISKA |
| | | KGQPREPQVYTLPPCRKKLTKNQVSLWCLVKGFYPSDIAVEWESNGQPENNYKTTPPVL |
| | | DSDGSFFLYSKLTVDKSRWQQGNVFSCSVMHEALHNHYTQKSLSLSPGK |
| Polypeptide | 92 | DKTHTCPPCPAPELLGGPSVFLFPPKPKDTLMISRTPEVTCVVVDVSHEDPEVKFNWYVD |
| chain | | GVEVHNAKTKPREEQYASTYRVVSVLTVLHQDWLNGKEYKCKVSNKALPAPIEKTISKA |
| | | KGQPREPQVYTLPPCRKKLTKNQVSLWCLVKGFYPSDIAVEWESNGQPENNYKTTPPVL |
| | | DSDGSFFLYSKLTVDKSRWQQGNVFSCSVMHEALHNHYTQKSLSLSPGPGSGAVNGTSQ |
| | | FTCFYNSRANISCVWSQDGALQDTSCQVHAWPDKRRWNQTCELLPVSQASWACNLILG |
| | | APDSQKLTTVDIVTLRVLCREGVRWRVMAIQDFKPFENLRLMAPISLQWHVETHRCNIS |
| | | WEISQASHYFERHLEFEARTLSPGHTWEEAPLLTLKQKQEWICLETLTPDTQYEFQVRVK |
| | | PLQGEFTTWSPWSQPLAFRTKPAALGKD |
| Polypeptide | 93 | DKTHTCPPCPAPELLGGPSVFLFPPKPKDTLMISRTPEVTCVVVDVSHEDPEVKFNWYVD |
| chain | | GVEVHNAKTKPREEQYASTYRVVSVLTVLHQDWLNGKEYKCKVSNKALPAPIEKTISKA |
| | | KGQPREPQVYTLPPCRDELTKNQVSLWCLVKGFYPSDIAVEWESNGQPENNYKTTPPVL |
| | | DSDGSFFLYSKLTVDKSRWQQGNVFSCSVMHEALHNHYTQKSLSLSPGGGSSPPMPYDL |
| | | YHPSGPAPTSSSTKKTQLQLEHLLLDLQMILNGINNYKNPKLTAMLTAKFAMPKKATELK |
| | | HLQCLEEALKPLEEVLNLAQSKNFHLRPRDLISNINVIVLELKGSETTFMCEYADETATI |
| | | VEFLNRWITFAQSIISTLT |
| Polypeptide | 94 | DKTHTCPPCPAPELLGGPSVFLFPPKPKDTLMISRTPEVTCVVVDVSHEDPEVKFNWYVD |
| chain | | GVEVHNAKTKPREEQYASTYRVVSVLTVLHQDWLNGKEYKCKVSNKALPAPIEKTISKA |
| | | KGQPREPQVYTLPPCRDELTKNQVSLWCLVKGFYPSDIAVEWESNGQPENNYKTTPPVL |
| | | DSDGSFFLYSKLTVDKSRWQQGNVFSCSVMHEALHNHYTQKSLSLSPGGGPGGPRAAAV |
| | | KSPSGPAPTSSSTKKTQLQLEHLLLDLQMILNGINNYKNPKLTRMLTFKFYMPKKATELK |
| | | HLQCLEEELKPLEEVLNLAQSKNFHLRPRDLISNINVIVLELKGSETTFMCEYADETATIVE |
| | | FLNRWITFAQSIISTLT |
| Polypeptide | 95 | DKTHTCPPCPAPELLGGPSVFLFPPKPKDTLMISRTPEVTCVVVDVSHEDPEVKFNWYVD |
| chain | | GVEVHNAKTKPREEQYASTYRVVSVLTVLHQDWLNGKEYKCKVSNKALPAPIEKTISKA |
| | | KGQPREPQVYTLPPCRDELTKNQVSLWCLVKGFYPSDIAVEWESNGQPENNYKTTPPVL |
| | | DSDGSFFLYSKLTVDKSRWQQGNVFSCSVMHEALHNHYTQKSLSLSPGGGSSPPRAAAV |
| | | KSPSGPAPTSSSTKKTQLQLEHLLLDLQMILNGINNYKNPKLTAMLTAKFAMPKKATELK |
| | | HLQCLEEALKPLEEVLNLAQSKNFHLRPRDLISNINVIVLELKGSETTFMCEYADETATIVE |
| | | FLNRWITFAQSIISTLT |
| Polypeptide | 96 | DKTHTCPPCPAPELLGGPSVFLFPPKPKDTLMISRTPEVTCVVVDVSHEDPEVKFNWYVD |
| chain | | GVEVHNAKTKPREEQYASTYRVVSVLTVLHQDWLNGKEYKCKVSNKALPAPIEKTISKA |
| | | KGQPREPQVYTLPPCRDELTKNQVSLWCLVKGFYPSDIAVEWESNGQPENNYKTTPPVL |
| | | DSDGSFFLYSKLTVDKSRWQQGNVFSCSVMHEALHNHYTQKSLSLSPGGGPGGPRAAAV |
| | | KSPSGPAPTSSSTKKTQLQLEHLLLDLQMILNGINNYKNPKLTAMLTAKFAMPKKATELK |
| | | HLQCLEEALKPLEEVLNLAQSKNFHLRPRDLISNINVIVLELKGSETTFMCEYADETATI |
| | | VEFLNRWITFAQSIISTLT |
| Polypeptide | 97 | DKTHTCPPCPAPELLGGPSVFLFPPKPKDTLMISRTPEVTCVVVDVSHEDPEVKFNWYVD |
| chain | | GVEVHNAKTKPREEQYASTYRVVSVLTVLHQDWLNGKEYKCKVSNKALPAPIEKTISKA |
| | | KGQPREPQVYTLPPCRDELTKNQVSLWCLVKGFYPSDIAVEWESNGQPENNYKTTPPVL |
| | | DSDGSFFLYSKLTVDKSRWQQGNVFSCSVMHEALHNHYTQKSLSLSPGGGSGRAAAVKS |
| | | PSGPAPTSSSTKKTQLQLEHLLLDLQMILNGINNYKNPKLTRMLTFKFYMPKKATELKHL |
| | | QCLEEELKPLEEVLNLAQSKNFHLRPRDLISNINVIVLELKGSETTFMCEYADETATIVE |
| | | FLNRWITFAQSIISTLT |
| Polypeptide | 98 | DKTHTCPPCPAPELLGGPSVFLFPPKPKDTLMISRTPEVTCVVVDVSHEDPEVKFNWYVD |
| chain | | GVEVHNAKTKPREEQYASTYRVVSVLTVLHQDWLNGKEYKCKVSNKALPAPIEKTISKA |
| | | KGQPREPQVYTLPPCRDELTKNQVSLWCLVKGFYPSDIAVEWESNGQPENNYKTTPPVL |
| | | DSDGSFFLYSKLTVDKSRWQQGNVFSCSVMHEALHNHYTQKSLSLSPGGGSSPPGGGSS |
| | | GGGSGPAPTSSSTKKTQLQLEHLLLDLQMILNGINNYKNPKLTAMLTAKFAMPKKATEL |
| | | KHLQCLEEALKPLEEVLNLAQSKNFHLRPRDLISNINVIVLELKGSETTFMCEYADETATI |
| | | VEFLNRWITFAQSIISTLT |
| Polypeptide | 99 | DKTHTCPPCPAPELLGGPSVFLFPPKPKDTLMISRTPEVTCVVVDVSHEDPEVKFNWYVD |
| chain | | GVEVHNAKTKPREEQYASTYRVVSVLTVLHQDWLNGKEYKCKVSNKALPAPIEKTISKA |
| | | KGQPREPQVYTLPPCRDELTKNQVSLWCLVKGFYPSDIAVEWESNGQPENNYKTTPPVL |
| | | DSDGSFFLYSKLTVDKSRWQQGNVFSCSVMHEALHNHYTQKSLSLSPGGGSSPPMPYDL |
| | | YHPSGPAPTSSSTKKTQLQLEHLLLDLQMILNGINNYKNPKLTRMLTFKFYMPKKATELK |
| | | HLQCLEERLKPLEEVLNLAQSKNFHLRPRDLISNINVIVLELKGSETTFMCEYADETATI |
| | | VEFLNRWITFAQSIISTLT |
| Polypeptide | 100 | DKTHTCPPCPAPELLGGPSVFLFPPKPKDTLMISRTPEVTCVVVDVSHEDPEVKFNWYVD |
| chain | | GVEVHNAKTKPREEQYASTYRVVSVLTVLHQDWLNGKEYKCKVSNKALPAPIEKTISKA |
| | | KGQPREPQVYTLPPCRDELTKNQVSLWCLVKGFYPSDIAVEWESNGQPENNYKTTPPVL |
| | | DSDGSFFLYSKLTVDKSRWQQGNVFSCSVMHEALHNHYTQKSLSLSPGGGSSPPMPYDL |
| | | YHPSGPAPTSSSTKKTQLQLEHLLLDLQMILNGINNYKNPKLTRMLTEKFYMPKKATELK |
| | | HLQCLEEELKPLEEVLNLAQSKNFHLRPRDLISNINVIVLELKGSETTFMCEYADETATI |
| | | VEFLNRWITFAQSIISTLT |
| Polypeptide | 101 | DKTHTCPPCPAPELLGGPSVFLFPPKPKDTLMISRTPEVTCVWDVSHEDPEVKFNWYVD |
| chain | | GVEVHNAKTKPREEQYASTYRVVSVLTVLHQDWLNGKEYKCKVSNKALPAPIEKTISKA |
| | | KGQPREPQVYTLPPCRDELTKNQVSLWCLVKGFYPSDIAVEWESNGQPENNYKTTPPVL |
| | | DSDGSFFLYSKLTVDKSRWQQGNVFSCSVMHEALHNHYTQKSLSLSPGGGSSPPMPYDL |
| | | YHPSGPAPTSSSTKKTQLQLEHLLLDLQMILNGINNYKNPKLTRMLTFKFYMPKKATELK |
| | | HLQCLEESLKPLEEVLNLAQSKNFHLRPRDLISNINVIVLELKGSETTFMCEYADETATI |
| | | VEFLNRWITFAQSIISTLT |
| Polypeptide | 102 | DKTHTCPPCPAPELLGGPSVFLFPPKPKDTLMISRTPEVTCVVVDVSHEDPEVKFNWYVD |
| chain | | GVEVHNAKTKPREEQYASTYRVVSVLTVLHQDWLNGKEYKCKVSNKALPAPIEKTISKA |
| | | KGQPREPQVYTLPPCRDELTKNQVSLWCLVKGFYPSDIAVEWESNGQPENNYKTTPPVL |
| | | DSDGSFFLYSKLTVDKSRWQQGNVFSCSVMHEALHNHYTQKSLSLSPGGGSSPPMPYDL |
| | | YHPSGPAPTSSSTKKTQLQLEHLLLDLQMILNGINNYKNPKLTRMLTAKFYMPKKATELK |
| | | HLQCLEEELKPLEEVLNLAQSKNFHLRPRDLISNINVIVLELKGSETTFMCEYADETATI |
| | | VEFLNRWITFAQSIISTLT |
| Polypeptide | 103 | DKTHTCPPCPAPELLGGPSVFLFPPKPKDTLMISRTPEVTCVVVDVSHEDPEVKFNWYVD |
| chain | | GVEVHNAKTKPREEQYASTYRVVSVLTVLHQDWLNGKEYKCKVSNKALPAPIEKTISKA |
| | | KGQPREPQVYTLPPCRDELTKNQVSLWCLVKGFYPSDIAVEWESNGQPENNYKTTPPVL |
| | | DSDGSFFLYSKLTVDKSRWQQGNVFSCSVMHEALHNHYTQKSLSLSPGGGSSPPMPYDL |
| | | YHPSGPAPTSSSTKKTQLQLEHLLLDLQMILNGINNYKNPKLTRMLTFKFRMPKKATELK |
| | | HLQCLEEELKPLEEVLNLAQSKNFHLRPRDLISNINVIVLELKGSETTFMCEYADETATIVE |
| | | FLNRWITFAQSIISTLT |
| Polypeptide | 104 | DKTHTCPPCPAPELLGGPSVFLFPPKPKDTLMISRTPEVTCVVVDVSHEDPEVKFNWYVD |
| chain | | GVEVHNAKTKPREEQYASTYRVVSVLTVLHQDWLNGKEYKCKVSNKALPAPIEKTISKA |
| | | KGQPREPQVYTLPPCRDELTKNQVSLWCLVKGFYPSDIAVEWESNGQPENNYKTTPPVL |
| | | DSDGSFFLYSKLTVDKSRWQQGNVFSCSVMHEALHNHYTQKSLSLSPGGGSSPPMPYDL |
| | | YHPSGPAPTSSSTKKTQLQLEHLLLDLQMILNGINNYKNPKLTRMLTSKFYMPKKATELK |
| | | HLQCLFFSLKPLFEVLNLAQSKNFHLRPRDLISNINVIVLELKGSFTTFMCEYADETATIVE |
| | | FLNRWITFAQSIISTLT |
| Polypeptide | 105 | DKTHTCPPCPAPELLGGPSVFLFPPKPKDTLMISRTPEVTCVVVDVSHEDPEVKFNWYVD |
| chain | | GVEVHNAKTKPREEQYASTYRVVSVLTVLHQDWLNGKEYKCKVSNKALPAPIEKTISKA |
| | | KGQPREPQVYTLPPCRDELTKNQVSLWCLVKGFYPSDIAVEWESNGQPENNYKTTPPVL |
| | | DSDGSFFLYSKLTVDKSRWQQGNVFSCSVMHEALHNHYTQKSLSLSPGGSPGVPLSLYSG |
| | | PAPTSSSTKKTQLQLEHLLLDLQMILNGINNYKNPKLTRMLTFKFYMPKKATELKHLQCL |
| | | EERLKPLEEVLNLAQSKNFHLRPRDLISNINVIVLELKGSETTFMCEYADETATIVEFLNR |
| | | WITFAQSIISTLT |
| Polypeptide | 106 | DKTHTCPPCPAPELLGGPSVFLFPPKPKDTLMISRTPEVTCWVDVSHEDPEVKFNWYVD |
| chain | | GVEVHNAKTKPREEQYASTYRVVSVLTVLHQDWLNGKEYKCKVSNKALPAPIEKTISKA |
| | | KGQPREPQVYTLPPCRDELTKNQVSLWCLVKGFYPSDIAVEWESNGQPENNYKTTPPVL |
| | | DSDGSFFLYSKLTVDKSRWQQGNVFSCSVMHEALHNHYTQKSLSLSPGGSPGVPLSLYSG |
| | | PAPTSSSTKKTQLQLEHLLLDLQMILNGINNYKNPKLTRMLTEKFYMPKKATELKHLQCL |
| | | EEELKPLEEVLNLAQSKNFHLRPRDLISNINVIVLELKGSETTFMCEYADETATIVEFLNRW |
| | | ITFAQSIISTLT |
| Polypeptide | 107 | DKTHTCPPCPAPELLGGPSVFLFPPKPKDTLMISRTPEVTCVVVDVSHEDPEVKFNWYVD |
| chain | | GVEVHNAKTKPREEQYASTYRVVSVLTVLHQDWLNGKEYKCKVSNKALPAPIEKTISKA |
| | | KGQPREPQVYTLPPCRDELTKNQVSLWCLVKGFYPSDIAVEWESNGQPENNYKTTPPVL |
| | | DSDGSFFLYSKLTVDKSRWQQGNVFSCSVMHEALHNHYTQKSLSLSPGGSPGVPLSLYSG |
| | | PAPTSSSTKKTQLQLEHLLLDLQMILNGINNYKNPKLTRMLTFKFYMPKKATELKHLQCL |
| | | EESLKPLEEVLNLAQSKNFHLRPRDLISNINVIVLELKGSETTFMCEYADETATIVEFLNRW |
| | | ITFAQSIISTLT |
| Polypeptide | 108 | DKTHTCPPCPAPELLGGPSVFLFPPKPKDTLMISRTPEVTCVVVDVSHEDPEVKFNWYVD |
| chain | | GVEVHNAKTKPREEQYASTYRVVSVLTVLHQDWLNGKEYKCKVSNKALPAPIEKTISKA |
| | | KGQPREPQVYTLPPCRDELTKNQVSLWCLVKGFYPSDIAVEWESNGQPENNYKTTPPVL |
| | | DSDGSFFLYSKLTVDKSRWQQGNVFSCSVMHEALHNHYTQKSLSLSPGGSPGVPLSLYSG |
| | | PAPTSSSTKKTQLQLEHLLLDLQMILNGINNYKNPKLTRMLTAKFYMPKKATELKHLQCL |
| | | EEELKPLEEVLNLAQSKNFHLRPRDLISNINVIVLELKGSETTFMCEYADETATIVEFLN |
| | | RWITFAQSIISTLT |
| Polypeptide | 109 | DKTHTCPPCPAPELLGGPSVFLFPPKPKDTLMISRTPEVTCVVVDVSHEDPEVKFNWYVD |
| chain | | GVEVHNAKTKPREEQYASTYRVVSVLTVLHQDWLNGKEYKCKVSNKALPAPIEKTISKA |
| | | KGQPREPQVYTLPPCRDELTKNQVSLWCLVKGFYPSDIAVEWESNGQPENNYKTTPPVL |
| | | DSDGSFFLYSKLTVDKSRWQQGNVFSCSVMHEALHNHYTQKSLSLSPGGSPGVPLSLYSG |
| | | PAPTSSSTKKTQLQLEHLLLDLQMILNGINNYKNPKLTRMLTFKFRMPKKATELKHLQCL |
| | | EEELKPLEEVLNLAQSKNFHLRPRDLISNINVIVLELKGSETTFMCEYADETATIVEFLN |
| | | RWITFAQSIISTLT |
| Polypeptide | 110 | DKTHTCPPCPAPELLGGPSVFLFPPKPKDTLMISRTPEVTCVVVDVSHEDPEVKFNWYVD |
| chain | | GVEVHNAKTKPREEQYASTYRVVSVLTVLHQDWLNGKEYKCKVSNKALPAPIEKTISKA |
| | | KGQPREPQVYTLPPCRDELTKNQVSLWCLVKGFYPSDIAVEWESNGQPENNYKTTPPVL |
| | | DSDGSFFLYSKLTVDKSRWQQGNVFSCSVMHEALHNHYTQKSLSLSPGGSPGVPLSLYSG |
| | | PAPTSSSTKKTQLQLEHLLLDLQMILNGINNYKNPKLTRMLTSKFYMPKKATELKHLQGL |
| | | EESLKPLEEVLNLAQSKNFHLRPRDLISNINVIVLELKGSETTFMCEYADETATFVEFLN |
| | | RWITFAQSIISTLT |
| Polypeptide | 111 | DKTHTCPPCPAPELLGGPSVFLFPPKPKDTLMISRTPEVTCVVVDVSHEDPEVKFNWYVD |
| chain | | GVEVHNAKTKPREEQYASTYRVVSVLTVLHQDWLNGKEYKCKVSNKALPAPIEKTISKA |
| | | KGQPREPQVYTLPPCRDELTKNQVSLWCLVKGFYPSDIAVEWESNGQPENNYKTTPPVL |
| | | DSDGSFFLYSKLTVDKSRWQQGKVFSCSVMHEALHNHYTQKSLSLSPGGSPGVPLSLYSG |
| | | PAPTSSSTKKTQLQLEHLLLDLQMILNGINNYKNPKLTRMLTFKFYMPKKATELKHLQCL |
| | | EEELKPLEEVLNLAQSKNFHLRPRDLISNINVIVLELKGSETTFMCEYADETATIVEFLNRW |
| | | ITFAQSIISTLT |

### 10.2 List of Constructs

[0972] The table below shows the full sequences for molecules labelled by ‘AK’ reference number. The component parts of the sequence are also shown as well as the order in which they are assembled in the chains of the molecules. Individual chains are labelled by a ‘DNA’ reference number:

| | | | Component1 | Component2 | Component3 |
|---|---|---|---|---|---|
| Molecule | name | newnames | Sequence | Sequence | Sequence |
| AK368 | DNA187 | Hole: | DKTHTCPPCPAPELLGGPSVFLFPP | PGSGS | AVNGTSQFTCFYNSRANISCVWSQD |
| | | hFc(N297A)- | KPKDTLMISRTPEVTCVVVDVSHED | (SEQ ID | GALQDTSCQVHAWPDRRRWNQTCEL |
| | | hCD122 | PEVKFNWYVDGVEVHNAKTKPREEQ | NO: 14) | LFVSQASWACNLILGAPDSQKLTTV |
| | | | YASTYRVVSVLTVLHQDWLNGKEYK | | DIVTLRVLCREGVRWRVMAIQDFKP |
| | | | CKVSNKALPAPIEKTISKAKGQPRE | | FENLRLMAPISLQVVHVETHRCNIS |
| | | | PQVCTLPPSRDELTKNQVSLSCAVK | | WEISQASHYFERHLEFEARTLSPGH |
| | | | GFYPSDIAVEWESNGQPENNYKTTP | | TWEEAPLLTLKQKQEWICLETLTPD |
| | | | PVLDSDGSFFLVSKLTVDKSRWQQG | | TQYEFQVRVKPLQGEFTTWSPWSQP |
| | | | NVFSCSVMHEALHNHYTQKSLSLSP | | LAFRTK PAALGKD |
| | | | G | | (SEQ ID |
| | | | (SEQ | | NO: 4) |
| | | | ID | | |
| | | | NO: 9) | | |
| AK368 | DNA476 | Knob: | DKTHTCPPCPAPELLGGPSVFLFPP | G | NPMGSDPVNFKLLRWNG |
| | | hFc(N297A)- | KPKDTLMISRTPEVTCVVVDVSHED | | (SEQ ID |
| | | [NPMGSC | PEVKFNWYVDGVEVKNAKTKPREEQ | | NO: 325) |
| | | PVNFKLLR | YASTYRVVSVLTVLHQDWLNGKEYK | | |
| | | WNG]- | CKVSNKALPAPIEKTISKAKGQPRE | | |
| | | hIL2(F42S, | PQVYTLFPCRDELTKNQVSLWCLVK | | |
| | | E82S, C12SA) | GFYPSDIAVEWESNGQPENNYKTTP | | |
| | | | PVLDSDGSFFLYSKLTVDKSRWQQG | | |
| | | | NVFSCSVMHEALHNEYTQKSLSLSP | | |
| | | | G | | |
| | | | (SEQ | | |
| | | | ID | | |
| | | | NO: 12) | | |
| AK375 | DNA477 | Knob: | TIKPCPPCKCPAPNAAGGPSVFIFP | GGSS | APTSSSTKKTQLQLEHLLLDLQMIL |
| | | mFcIgG2a | PKIKDVLMISLSPIVTCVVVDVSSD | PPGGG | NGINNYKNPKLTAMLTAKFAMPKKA |
| | | (LALAPG)- | DPDVQISWFVNNVEVHTAQTQTHRE | SSGG | TELKHLQCLEEALKPLEEVLNLAQS |
| | | hIL2(R38A, | DYNSTLRVVSALPIQHQDWMSGKEF | GSGP | KNFHLRPRDLISNINVIVLELKGSE |
| | | F42A, Y45A, | KCKVNNKDLGAPIERTISKPKGSVR | (SEQ ID | TTFMCEYADETATIVEFLNRWITFA |
| | | E62A, C125A) | APQVYVLPPCEEEMTKKQVTLWCMV | NO: 23) | QSIISTLT |
| | | | TDFMPEDIYVEWTNNGKTELNYKNT | | (SEQ ID |
| | | | EPVLDSDGSYFMVSKLRVEKKNWVE | | NO: 3) |
| | | | RNSYSCSVVHEGLHNHHTTKSFSRT | | |
| | | | PG | | |
| | | | (SEQ | | |
| | | | ID | | |
| | | | NO: 280) | | |
| AK376 | DNA479 | hole: | TIKPCPPCKCPAPNAAGGPSVFIFP | | |
| | | mFcIgG2a | PKIKDVLMISLSPIVTCVVVDVSED | | |
| | | (LALAPG) | DPDVQISWFVNNVEVHTAQTQTHRE | | |
| | | | DYNSTLRVVSALPIQHQDWMSGKEF | | |
| | | | KCKVNNKDLGAPIERTISKPKGSVR | | |
| | | | APQVCVLPPPEEEMTKKQVTLSCAV | | |
| | | | TDFMPEDIYVEWTNNGKTELNYKNT | | |
| | | | EPVLDSDGSYFMVSKLRVEKKNWVE | | |
| | | | RNSYSCSVVHEGLHNHHTTKSFSRT | | |
| | | | PG | | |
| | | | (SEQ | | |
| | | | ID | | |
| | | | NO: 281) | | |
| AK376 | DNA478 | Knob: | TIKFCPPCKCPAPNAAGGPSVFIFP | GSFG | VPLSLY |
| | | mFcIgG2a | PKIKDVLMISLSPIVTCVVVDVSSD | (SEQ ID | (SEQ ID |
| | | (LALAPG)- | DPDVQISWFVNNVEVHTAQTQTHRE | NO: 34) | NO: 28) |
| | | [VPLSLY]- | DYNSTLRVVSALPIQHQDWMSGKEF | | |
| | | hIL2(R38A, | KCKVNNKDLGAPIERTISKPKGSVR | | |
| | | F42A, Y45A, | APQVYVLPPCEEEMTKKQVTLWCMV | | |
| | | E62A, C125A) | TDFMPEDIYVEWTNNGKTELNYKNT | | |
| | | | EPVLDSDGSYFMVSKLRVEKKNWVE | | |
| | | | RNSYSCSVVHEGLHNHHTTKSFSRT | | |
| | | | PG | | |
| | | | (SEQ | | |
| | | | ID | | |
| | | | NO: 280) | | |
| AK376 | DNA479 | Hole: | TIKPCPPCKCPAPNAAGGPSVFIFP | | |
| | | mFcIgG2a | PKIKDVLMISLSPIVTCVVVDVSED | | |
| | | (LALAPG) | DPDVQISWFVNNVEVHTAQTQTHRE | | |
| | | | DYNSTLRVVSALPIQHQDWMSGKEF | | |
| | | | KCKVNNKDLGAPIERTISKPKGSVR | | |
| | | | APQVCVLPPPEEEMTKKQVTLSCAV | | |
| | | | TDFMPEDIYVEWTNNGKTELNYKNT | | |
| | | | EPVLDSDGSYFMVSKLRVEKKNWVE | | |
| | | | RNSYSCSVVHEGLHNHHTTKSFSRT | | |
| | | | PG | | |
| | | | (SEQ | | |
| | | | ID | | |
| | | | NO: 281) | | |
| AK377 | DNA477 | Knob: | TIKFCPPCKCPAPNAAGGPSVFIFP | GGSSP | APTSSSTKKTQLQLEHLLLDLQMIL |
| | | mFcIgG2a | PKIKDVLMISLSPIVTCVVVDVSSD | PGGGS | NGINNYKNPKLTAMLTAKFAMPKKA |
| | | (LALAPG)- | DPDVQISWFVNNVEVHTAQTQTHRE | SGG | TELKHLQCLEEALKPLEEVLNLAQS |
| | | [VPLSLY]- | DYNSTLRVVSALPIQHQDWMSGKEF | GSGP | KNFHLRPRDLISNINVIVLELKGSE |
| | | hIL2(R38A, | KCKVNNKDLGAPIERTISKPKGSVR | (SEQ ID | TTFMCEYADETATIVEFLNRWITFA |
| | | F42A, Y45A, | APQVYVLPPCEEEMTKKQVTLWCMV | NO: 23) | QSIISTLT |
| | | E62A, C125A) | TDFMPEDIYVEWTNNGKTELNYKNT | | (SEQ ID |
| | | | EPVLDSDGSYFMVSKLRVEKKNWVE | | NO: 3) |
| | | | RNSYSCSVVHEGLHNHHTTKSFSRT | | |
| | | | PG | | |
| | | | (SEQ | | |
| | | | ID | | |
| | | | NO: 280) | | |
| AK377 | DNA480 | Hole: | TIKPCPPCKCPAPNAAGGPSVFIFP | PGSGS | AVNGTSQFTCFYNSRANISCVWSQD |
| | | mFcIgG2a | PKIKDVLMISLSPIVTCVVVDVSED | (SEQ ID | GALQDTSCQVHAWPDRRRWNQTCEL |
| | | (LALAPG)- | DPDVQISWFVNNVEVHTAQTQTHRE | NO: 14) | LFVSQASWACNLILGAPDSQKLTTV |
| | | hCD122 | DYNSTLRVVSALPIQHQDWMSGKEF | | DIVTLRVLCREGVRWRVMAIQDFKP |
| | | | KCKVNNKDLGAPIERTISKPKGSVR | | FENLRLMAPISLQVVHVETHRCNIS |
| | | | APQVCVLPPPEEEMTKKQVTLSCAV | | WEISQASHYFERHLEFEARTLSPGH |
| | | | TDFMPEDIYVEWTNNGKTELNYKNT | | TWEEAPLLTLKQKQEWICLETLTPD |
| | | | EPVLDSDGSYFMVSKLRVEKKNWVE | | TQYEFQVRVKPLQGEFTTWSPWSQP |
| | | | RNSYSCSVVHEGLHNHHTTKSFSRT | | LAFRTKPAALGKD |
| | | | PG | | (SEQ ID NO: 4) |
| | | | (SEQ | | |
| | | | ID | | |
| | | | NO: 281) | | |
| AK378 | DNA470 | Knob: | TIKFCPPCKCPAPNAAGGPSVFIFP | | |
| | | mFcIgG2a | PKIKDVLMISLSPIVTCVVVDVSSD | | |
| | | (LALAPG)- | DPDVQISWFVNNVEVHTAQTQTHRE | | |
| | | [VPLSLY]- | DYNSTLRVVSALPIQHQDWMSGKEF | | |
| | | hIL2(R38A, | KCKVNNKDLGAPIERTISKPKGSVR | | |
| | | F42A, Y45A, | APQVYVLPPCEEEMTKKQVTLWCMV | | |
| | | E62A, C125A) | TDFMPEDIYVEWTNNGKTELNYKNT | | |
| | | | EPVLDSDGSYFMVSKLRVEKKNWVE | | |
| | | | RNSYSCSVVHEGLHNHHTTKSFSRT | | |
| | | | PG | | |
| | | | (SEQ | | |
| | | | ID | | |
| | | | NO: 280) | | |
| AK378 | DNA480 | Hole: | TIKPCPPCKCPAPNAAGGPSVFIFP | PGSGS | AVNGTSQFTCFYNSRANISCVWSQD |
| | | mFcIgG2a | PKIKDVLMISLSPIVTCVVVDVSED | (SEQ ID | GALQDTSCQVHAWPDRRRWNQTCEL |
| | | (LALAPG)- | DPDVQISWFVNNVEVHTAQTQTHRE | NO: 14) | LFVSQASWACNLILGAPDSQKLTTV |
| | | hCD122 | DYNSTLRVVSALPIQHQDWMSGKEF | | DIVTLRVLCREGVRWRVMAIQDFKP |
| | | | KCKVNNKDLGAPIERTISKPKGSVR | | FENLRLMAPISLQVVHVETHRCNIS |
| | | | APQVCVLPPPEEEMTKKQVTLSCAV | | WEISQASHYFERHLEFEARTLSPGH |
| | | | TDFMPEDIYVEWTNNGKTELNYKNT | | TWEEAPLLTLKQKQEWICLETLTPD |
| | | | EPVLDSDGSYFMVSKLRVEKKNWVE | | TQYEFQVRVKPLQGEFTTWSPWSQP |
| | | | RNSYSCSVVHEGLHNHHTTKSFSRT | | LAFRTKPAALGKD |
| | | | PG | | (SEQ ID NO: 4) |
| | | | (SEQ | | |
| | | | ID | | |
| | | | NO: 281) | | |
| AK397 | DNA158 | Hole: | DKTHTCPPCPAPELLGGPSVFLFPP | | |
| | | hFc(N297A) | KPKDTLMISRTPEVTCVVVDVSHED | | |
| | | | PEVKFNWYVDGVEVHNAKTKPREEQ | | |
| | | | YASTYRVVSVLTVLHQDWLNGKEYK | | |
| | | | CKVSNKALPAPIEKTISKAKGQPRE | | |
| | | | PQVCTLPPSRDELTKNQVSLSCAVK | | |
| | | | GFYPSDIAVEWESNGQPENNYKTTP | | |
| | | | PVLDSDGSFFLVSKLTVDKSRWQQG | | |
| | | | MVFSCSVMHEALHNHYTQKSLSLSP | | |
| | | | G | | |
| | | | (SEQ | | |
| | | | ID | | |
| | | | NO: 9) | | |
| AK397 | DNA258 | Hole: | DKTHTCPPCPAPELLGGPSVFLFPP | GSGP | DSGGFMLT |
| | | hFc(N297A) | KPKDTLMISRTPEVTCVVVDVSHED | (SEQ ID | (SEQ ID NO: 25) |
| | | | PEVKFNWYVDGVEVHNAKTKPREEQ | NO: 33) | |
| | | | YASTYRVVSVLTVLHQDWLNGKEYK | | |
| | | | CKVSNKALPAPIEKTISKAKGQPRE | | |
| | | | PQVYTLPPCRDELTKNQVSLWCLVK | | |
| | | | GFYPSDIAVEWESNGQPENNYKTTP | | |
| | | | PVLDSDGSFFLYSKLTVDKSRWQQG | | |
| | | | NVFSCSVMHEALHNHYTQKSLSLSP | | |
| | | | G | | |
| | | | (SEQ | | |
| | | | ID | | |
| | | | NO: 12) | | |
| AK429 | DNA477 | Knob: | TIKFCPPCKCPAPNAAGGPSVFIFP | GGSSP | APTSSSTKKTQLQLEHLLLDLQMIL |
| | | mFcIgG2a | PKIKDVLMISLSPIVTCVVVDVSSD | PGGG | NGINNYKNPKLTAMLTAKFAMPKKA |
| | | (LALAPG)- | DPDVQISWFVNNVEVHTAQTQTHRE | SSGG | TELKHLQCLEEALKPLEEVLNLAQS |
| | | hIL2(R38A, | DYNSTLRVVSALPIQHQDWMSGKEF | GSGP | KNFHLRPRDLISNINVIVLELKGSE |
| | | F42A, Y45A, | KCKVNNKDLGAPIERTISKPKGSVR | (SEQ ID | TTFMCEYADETATIVEFLNRWITFA |
| | | E62A, C125A) | APQVYVLPPCEEEMTKKQVTLWCMV | NO: 23) | QSIISTLT |
| | | | TDFMPEDIYVEWTNNGKTELNYKNT | | (SEQ ID |
| | | | EPVLDSDGSYFMVSKLRVEKKNWVE | | NO: 3) |
| | | | RNSYSCSVVHEGLHNHHTTKSFSRT | | |
| | | | PG | | |
| | | | (SEQ | | |
| | | | ID | | |
| | | | NO: 280) | | |
| AK429 | DNA520 | Hole: | TIKPCPPCKCPAPNAAGGPSVFIFP | HHHH | |
| | | mFcIgG2a (LALAPG)- | PKIKDVLMISLSPIVTCVVVDVSED | HHHH | |
| | | NoAnnotation | DPDVQISWFVNNVEVHTAQTQTHRE | (SEQ ID | |
| | | Found | DYNSTLRVVSALPIQHQDWMSGKEF | NO: 308) | |
| | | | KCKVNNKDLGAPIERTISKPKGSVR | | |
| | | | APQVCVLPPPEEEMTKKQVTLSCAV | | |
| | | | TDFMPEDIYVEWTNNGKTELNYKNT | | |
| | | | EPVLDSDGSYFMVSKLRVEKKNWVE | | |
| | | | RNSYSCSVVHEGLHNHHTTKSFSRT | | |
| | | | PG | | |
| | | | (SEQ | | |
| | | | ID | | |
| | | | NO: 281) | | |
| AK430 | DNA477 | Knob: | TIKFCPPCKCPAPNAAGGPSVFIFP | GGSSP | APTSSSTKKTQLQLEHLLLDLQMIL |
| | | mFcIgG2a | PKIKDVLMISLSPIVTCVVVDVSSD | PGGGS | NGINNYKNPKLTAMLTAKFAMPKKA |
| | | (LALAPG)- | DPDVQISWFVNNVEVHTAQTQTHRE | SGG | TELKHLQCLEEALKPLEEVLNLAQS |
| | | hIL2(R38A, | DYNSTLRVVSALPIQHQDWMSGKEF | GSGP | KNFHLRPRDLISNINVIVLELKGSE |
| | | F42A, Y45A, | KCKVNNKDLGAPIERTISKPKGSVR | (SEQ ID | TTFMCEYADETATIVEFLNRWITFA |
| | | E62A, C125A) | APQVYVLPPCEEEMTKKQVTLWCMV | NO: 23) | QSIISTLT |
| | | | TDFMPEDIYVEWTNNGKTELNYKNT | | (SEQ ID |
| | | | EPVLDSDGSYFMVSKLRVEKKNWVE | | NO: 3) |
| | | | RNSYSCSVVHEGLHNHHTTKSFSRT | | |
| | | | PG | | |
| | | | (SEQ | | |
| | | | ID | | |
| | | | NO: 280) | | |
| AK430 | DNA521 | Hole: | TIKPCPPCKCPAPNAAGGPSVFIFP | PGSGS | AVNGTSQFTCFYNSRANISCVWSQD |
| | | mFcIgG2a | PKIKDVLMISLSPIVTCVVVDVSED | (SEQ ID | GALQDTSCQVHAWPDRRRWNQTCEL |
| | | (LALAPG)- | DPDVQISWFVNNVEVHTAQTQTHRE | NO: 14) | LFVSQASWACNLILGAPDSQKLTTV |
| | | hCD122- | DYNSTLRVVSALPIQHQDWMSGKEF | | DIVTLRVLCREGVRWRVMAIQDFKP |
| | | NoAnnotation | KCKVNNKDLGAPIERTISKPKGSVR | | FENLRLMAPISLQVVHVETHRCNIS |
| | | Found | APQVCVLPPPEEEMTKKQVTLSCAV | | WEISQASHYFERHLEFEARTLSPGH |
| | | | TDFMPEDIYVEWTNNGKTELNYKNT | | TWEEAPLLTLKQKQEWICLETLTPD |
| | | | EPVLDSDGSYFMVSKLRVEKKNWVE | | TQYEFQVRVKPLQGEFTTWSPWSQP |
| | | | RNSYSCSVVHEGLHNHHTTKSFSRT | | LAFRTKPAALGKD |
| | | | PG | | (SEQ ID NO: 4) |
| | | | (SEQ | | |
| | | | ID | | |
| | | | NO: 281) | | |
| AK431 | | Knob: | TIKFCPPCKCPAPNAAGGPSVFIFP | GGSSPP | APTSSSTKKTQLQLEHLLLDLQMIL |
| | | mFcIgG2a | PKIKDVLMISLSPIVTCVVVDVSSD | GGGSS | NGINNYKNPKLTAMLTAKFAMPKKA |
| | | (LALAPG)- | DPDVQISWFVNNVEVHTAQTQTHRE | GG | TELKHLQCLEEALKPLEEVLNLAQS |
| | | hIL2(R38A, | DYNSTLRVVSALPIQHQDWMSGKEF | GSGP | KNFHLRPRDLISNINVIVLELKGSE |
| | | F42A, Y45A, | KCKVNNKDLGAPIERTISKPKGSVR | (SEQ ID | TTFMCEYADETATIVEFLNRWITFA |
| | | E62A, C125A) | APQVYVLPPCEEEMTKKQVTLWCMV | NO: 23) | QSIISTLT |
| | | | TDFMPEDIYVEWTNNGKTELNYKNT | | (SEQ ID |
| | | | EPVLDSDGSYFMVSKLRVEKKNWVE | | NO: 3) |
| | | | RNSYSCSVVHEGLHNHHTTKSFSRT | | |
| | | | PG | | |
| | | | (SEQ | | |
| | | | ID | | |
| | | | NO: 280) | | |
| AK431 | | Hole: | TIKPCPPCKCPAPNAAGGPSVFIFP | PGSGS | AVKNCSHLECFYNSRANVSCMWSHE |
| | | mFcIgG2a (LALAPG)- | PKIKDVLMISLSPIVTCVVVDVSED | (SEQ ID | EALNVTTCHVHAKSNLRHWNKTCEL |
| | | mCD122- | DPDVQISWFVNNVEVHTAQTQTHRE | NO: 14) | TLVRQASWACNLILGSFPESQSLTS |
| | | NoAnnotationFound | DYNSTLRVVSALPIQHQDWMSGKEF | | VDLLDINVVCWEEKGWRRVKTCDFH |
| | | | KCKVNNKDLGAPIERTISKPKGSVR | | PFDNLRLVAPHSLQVLHIDTQRCNI |
| | | | APQVCVLPPPEEEMTKKQVTLSCAV | | SWKVSQVSHYIEPYLEFEARRRLLG |
| | | | TDFMPEDIYVEWTNNGKTELNYKNT | | HSWEDASVLSLKQRQQWLFLEMLIP |
| | | | EPVLDSDGSYFMVSKLRVEKKNWVE | | STSYEVQVRVKAQRN |
| | | | RNSYSCSVVHEGLHNHHTTKSFSRT | | NTGTWSPWSQPLTFRTRPADPMKE |
| | | | PG | | (SEQ ID |
| | | | (SEQ | | NO: 326) |
| | | | ID | | |
| | | | NO: 281) | | |
| AK432 | | Knob: | TIKFCPPCKCPAPNAAGGPSVFIFP | GSPG | VPLSLY |
| | | mFcIgG2a | PKIKDVLMISLSPIVTCVVVDVSSD | (SEQ ID | (SEQ ID |
| | | (LALAPG)- | DPDVQISWFVNNVEVHTAQTQTHRE | NO: 34) | NO: 28) |
| | | [VPLSLY]- | DYNSTLRVVSALPIQHQDWMSGKEF | | |
| | | hIL2(R38A, | KCKVNNKDLGAPIERTISKPKGSVR | | |
| | | F42A, Y45A, | APQVYVLPPCEEEMTKKQVTLWCMV | | |
| | | E62A, C125A) | TDFMPEDIYVEWTNNGKTELNYKNT | | |
| | | | EPVLDSDGSYFMVSKLRVEKKNWVE | | |
| | | | RNSYSCSVVHEGLHNHHTTKSFSRT | | |
| | | | PG | | |
| | | | (SEQ | | |
| | | | ID | | |
| | | | NO: 280) | | |
| AK432 | | Hole: | TIKPCPPCKCPAPNAAGGPSVFIFP | PGSGS | AVNGTSQFTCFYNSRANISCVWSQD |
| | | mFcIgG2a | PKIKDVLMISLSPIVTCVVVDVSED | (SEQ ID | GALQDTSCQVHAWPDRRRWNQTCEL |
| | | (LALAPG)- | DPDVQISWFVNNVEVHTAQTQTHRE | NO: 14) | LFVSQASWACNLILGAPDSQKLTTV |
| | | hCD122- | DYNSTLRVVSALPIQHQDWMSGKEF | | DIVTLRVLCREGVRWRVMAIQDFKP |
| | | NoAnnotation | KCKVNNKDLGAPIERTISKPKGSVR | | FENLRLMAPISLQVVHVETHRCNIS |
| | | Found | APQVCVLPPPEEEMTKKQVTLSCAV | | WEISQASHYFERHLEFEARTLSPGH |
| | | | TDFMPEDIYVEWTNNGKTELNYKNT | | TWEEAPLLTLKQKQEWICLETLTPD |
| | | | EPVLDSDGSYFMVSKLRVEKKNWVE | | TQYEFQVRVKPLQGEFTTWSPWSQP |
| | | | RNSYSCSVVHEGLHNHHTTKSFSRT | | LAFRTKPAALGKD |
| | | | PG | | (SEQ ID NO: 4) |
| | | | (SEQ | | |
| | | | ID | | |
| | | | NO: 281) | | |
| AK433 | | Knob: | TIKFCPPCKCPAPNAAGGPSVFIFP | GSPG | VPLSLY |
| | | mFcIgG2a | PKIKDVLMISLSPIVTCVVVDVSSD | (SEQ ID | (SEQ ID |
| | | (LALAPG)- | DPDVQISWFVNNVEVHTAQTQTHRE | NO: 34) | NO: 28) |
| | | [VPLSLY]- | DYNSTLRVVSALPIQHQDWMSGKEF | | |
| | | hIL2(R38A, | KCKVNNKDLGAPIERTISKPKGSVR | | |
| | | F42A, Y45A, | APQVYVLPPCEEEMTKKQVTLWCMV | | |
| | | E62A, C125A) | TDFMPEDIYVEWTNNGKTELNYKNT | | |
| | | | EPVLDSDGSYFMVSKLRVEKKNWVE | | |
| | | | RNSYSCSVVHEGLHNHHTTKSFSRT | | |
| | | | PG | | |
| | | | (SEQ | | |
| | | | ID | | |
| | | | NO: 280) | | |
| AK433 | | Hole: | TIKPCPPCKCPAPNAAGGPSVFIFP | PGSGS | AVKNCSHLECFYNSRANVSCMWSHE |
| | | mFcIgG2a | PKIKDVLMISLSPIVTCVVVDVSED | (SEQ ID | EALNVTTCHVHAKSNLRHWNKTCEL |
| | | (LALAPG)- | DPDVQISWFVNNVEVHTAQTQTHRE | NO: 14) | TLVRQASWACNLILGSFPESQSLTS |
| | | hCD122- | DYNSTLRVVSALPIQHQDWMSGKEF | | VDLLDINVVCWEEKGWRRVKTCDFH |
| | | NoAnnotation | KCKVNNKDLGAPIERTISKPKGSVR | | PFDNLRLVAPHSLQVLHIDTQRCNI |
| | | Found | APQVCVLPPPEEEMTKKQVTLSCAV | | SWKVSQVSHYIEPYLEFEARRRLLG |
| | | | TDFMPEDIYVEWTNNGKTELNYKNT | | HSWEDASVLSLKQRQQWLFLEMLIP |
| | | | EPVLDSDGSYFMVSKLRVEKKNWVE | | STSYEVQVRVKAQRNNTGTWSPWSQ |
| | | | RNSYSCSVVHEGLHN | | PLTFRTRPADPMKE |
| | | | | | (SEQ ID |
| | | | HHTTKSFSRTPG | | NO: 326) |
| | | | (SEQ | | |
| | | | ID | | |
| | | | NO: 281) | | |
| AK435 | | Knob: | DKTHTCPPCPAPELLGGPSVFLFPP | GSPG | VPLSLY |
| | | hFc(N297A)- | KPKDTLMISRTPEVTCVVVDVSHED | (SEQ ID | (SEQ ID |
| | | [VPLSLY]- | PEVKFNWYVDGVEVHNAKTKPREEQ | NO: 34) | NO: 28) |
| | | hIL2(R38A, | YASTYRVVSVLTVLHQDWLNGKEYK | | |
| | | F42A, Y45A, | CKVSNKALPAPIEKTISKAKGQPRE | | |
| | | E62A, C125A) | PQVYTLPPCRDELTKNQVSLWCLVK | | |
| | | | GFYPSDIAVEWESNGQPENNYKTTP | | |
| | | | PVLDSDGSFFLYSKLTVDKSRWQQG | | |
| | | | NVFSCSVMHEALHNHYTQKSLSLSP | | |
| | | | G | | |
| | | | (SEQ | | |
| | | | ID | | |
| | | | NO: 12) | | |
| AK435 | | F8ScFvVersion1- | EVQLLESGGGLVQPGGSLRLSCAASG | GGS | DKTHTCPPCPAPELLGGPSVFLFPP |
| | | Hole: | FTFSLFTMSWVRQAPGKGLEVVVSA | | KPKDTLMISRTPEVTCVVVDVSHED |
| | | hFc(N297A)- | ISGSGGSTYYADSVKGRFTISRDNS | | PEVKFNWYVDGVEVHNAKTKPREEQ |
| | | hCD122- | KNTLYLQMNSLRAEDTAVYYCAKST | | YASTYRVVSVLTVLHQDWLNGKEYK |
| | | NoAnnotation | HLYLFDYWGQGTLVTVSSGGGGSGG | | CKVSNKALPAPIEKTISKAKGQPRE |
| | | Found | GGSGGGGSEIVLTQSPGTLSLSPGE | | PQVCTLPPSRDELTKNQVSLSCAVK |
| | | | RATLSCRASQSVSMPFLAWYQQKPG | | GFYPSDIAVEWESNGQPENNYKTTP |
| | | | QAPRLLIYGASSRATGIPDRFSGSG | | PVLDSDGSFFLVSKLTVDKSRWQQG |
| | | | SGTDFTLTISRLEPEDFAVYYCQQM | | NVFSCSVMHEALHNH |
| | | | RGRPPTFGQGTKVEIK | | YTQKSLSLSPG |
| | | | (SEQ | | (SEQ ID |
| | | | ID | | NO: 9) |
| | | | NO: 282) | | |
| AK436 | DNA187 | Hole: | DKTHTCPPCPAPELLGGPSVFLFPP | PGSGS | AVNGTSQFTCFYNSRANISCVWSQD |
| | | hFc(N297A)- | KPKDTLMISRTPEVTCVVVDVSHED | (SEQ ID | GALQDTSCQVHA |
| | | hCD122 | PEVKFNWYVDGVEVHNAKTKPREEQ | NO: 14) | WPDRRRWNQTCELLFVSQASWACNL |
| | | | YASTYRVVSVLTVLHQDWLNGKEYK | | ILGAPDSQKLTT |
| | | | CKVSNKALPAPIEKTISKAKGQPRE | | VDIVTLRVLCREGVRWRVMAIQDFK |
| | | | PQVCTLPPSRDELTKNQVSLSCAVK | | PFENLRLMAPIS |
| | | | GFYPSDIAVEWESNGQPENNYKTTP | | LQVVHVETHRCNISWEISQASHYFE |
| | | | PVLDSDGSFFLVSKLTVDKSRWQQG | | RHLEFEARTLSP |
| | | | MVFSCSVMHEALHNHYTQKSLSLSP | | GHTWEEAPLLTLKQKQEWICLETLT |
| | | | G | | PDTQYEFQVRVK |
| | | | (SEQ | | PLQGEFTTWSPWSQPLAFRTKPAAL |
| | | | ID | | GKD |
| | | | NO: 9) | | (SEQ ID |
| | | | | | NO: 4) |
| AK436 | DNA542 | Knob: | DKTHTCPPCPAPELLGGPSVFLFPP | | APTSSSTKKTQLQLEHLLLDLQMIL |
| | | hFc(N297A)- | KPKDTLMISRTPEVTCVVVDVSHED | | NGINNYKNPKLTAMLTAKFAMPKKA |
| | | [VPLSLY]- | PEVKFNWYVDGVEVHNAKTKPREEQ | | TELKHLQCLEEALKPLEEVLNLAQS |
| | | hIL2(R38A, | YASTYRVVSVLTVLHQDWLNGKEYK | | KNFHLRPRDLISNINVIVLELKGSE |
| | | F42A, Y45A, | CKVSNKALPAPIEKTISKAKGQPRE | | TTFMCEYADETATIVEFLNRWITFA |
| | | E62A, C125A) | PQVYTLPPCRDELTKNQVSLWCLVK | | QSIISTLT |
| | | | GFYPSDIAVEWESNGQPENNYKTTP | | (SEQ ID |
| | | | PVLDSDGSFFLYSKLTVDKSRWQQG | | NO: 3) |
| | | | NVFSCSVMHEALHNHYTQKSLSLSP | | |
| | | | G | | |
| | | | (SEQ | | |
| | | | ID | | |
| | | | NO: 12) | | |
| AK437 | DNA187 | Hole: | DKTHTCPPCPAPELLGGPSVFLFPP | PGSGS | AVNGTSQFTCFYNSRANISCVWSQD |
| | | hFc(N297A)- | KPKDTLMISRTPEVTCVVVDVSHED | (SEQ ID | GALQDTSCQVHAWPDRRRWNQTCEL |
| | | hCD122 | PEVKFNWYVDGVEVHNAKTKPREEQ | NO: 14) | LFVSQASWACNLILGAPDSQKLTTV |
| | | | YASTYRVVSVLTVLHQDWLNGKEYK | | DIVTLRVLCREGVRWRVMAIQDFKP |
| | | | CKVSNKALPAPIEKTISKAKGQPRE | | FENLRLMAPISLQVVHVETHRCNIS |
| | | | PQVCTLPPSRDELTKNQVSLSCAVK | | WEISQASHYFERHLEFEARTLSPGH |
| | | | GFYPSDIAVEWESNGQPENNYKTTP | | TWEEAPLLTLKQKQEWICLETLTPD |
| | | | PVLDSDGSFFLVSKLTVDKSRWQQG | | TQYEFQVRVKPLQGEFTTWSPWSQP |
| | | | MVFSCSVMHEALHNHYTQKSLSLSP | | LAFRTKPAALGKD |
| | | | G | | (SEQ ID |
| | | | (SEQ | | NO: 4) |
| | | | ID | | |
| | | | NO: 9) | | |
| AK437 | DNA545 | Knob: | DKTHTCPPCPAPELLGGPSVFLFPP | GISSGLL | APTSSSTKKTQLQLEHLLLDLQMIL |
| | | hFc(N297A)- | KPKDTLMISRTPEVTCVVVDVSHED | SGRSSGP | NGINNYKNPKLTAMLTAKFAMPKKA |
| | | [VPLSLY]- | PEVKFNWYVDGVEVHNAKTKPREEQ | (SEQ ID | TELKHLQCLEEALKPLEEVLNLAQS |
| | | hIL2(R38A, | YASTYRVVSVLTVLHQDWLNGKEYK | NO: 311) | KNFHLRPRDLISNINVIVLELKGSE |
| | | F42A, Y45A, | CKVSNKALPAPIEKTISKAKGQPRE | | TTFMCEYADETATIVEFLNRWITFA |
| | | E62A, C125A) | PQVYTLPPCRDELTKNQVSLWCLVK | | QSIISTLT |
| | | | GFYPSDIAVEWESNGQPENNYKTTP | | (SEQ ID |
| | | | PVLDSDGSFFLYSKLTVDKSRWQQG | | NO: 3) |
| | | | NVFSCSVMHEALHNHYTQKSLSLSP | | |
| | | | G | | |
| | | | (SEQ | | |
| | | | ID | | |
| | | | NO: 12) | | |
| AK438 | DNA255 | Knob: | DKTHTCPPCPAPELLGGPSVFLFPP | GGSS | APTSSSTKKTQLQLEHLLLDLQMIL |
| | | hFc(N297A)- | KPKDTLMISRTPEVTCVVVDVSHED | PPGG | NGINNYKNPKLTAMLTAKFAMPKKA |
| | | hIL2(R38A, | PEVKFNWYVDGVEVHNAKTKPREEQ | GSSGG | TELKHLQCLEEALKPLEEVLNLAQS |
| | | F42A, Y45A, | YASTYRVVSVLTVLHQDWLNGKEYK | GSGP | KNFHLRPRDLISNINVIVLELKGSE |
| | | E62A, C125A) | CKVSNKALPAPIEKTISKAKGQPRE | (SEQ ID | TTFMCEYADETATIVEFLNRWITFA |
| | | | PQVYTLPPCRDELTKNQVSLWCLVK | NO: 23) | QSIISTLT |
| | | | GFYPSDIAVEWESNGQPENNYKTTP | | (SEQ ID |
| | | | PVLDSDGSFFLYSKLTVDKSRWQQG | | NO: 3) |
| | | | NVFSCSVMHEALHNHYTQKSLSLSP | | |
| | | | G | | |
| | | | (SEQ | | |
| | | | ID | | |
| | | | NO: 12) | | |
| AK438 | DNA543 | Hole: | DKTHTCPPCPAPELLGGPSVFLFPP | GPPSGSSPG | VPLSLY |
| | | hFc(N297A)- | KPKDTLMISRTPEVTCVVVDVSHED | (SEQ ID | (SEQ ID |
| | | hCD122 | PEVKFNWYVDGVEVHNAKTKPREEQ | NO: 36) | NO: 28) |
| | | | YASTYRVVSVLTVLHQDWLNGKEYK | | |
| | | | CKVSNKALPAPIEKTISKAKGQPRE | | |
| | | | PQVCTLPPSRDELTKNQVSLSCAVK | | |
| | | | GFYPSDIAVEWESNGQPENNYKTTP | | |
| | | | PVLDSDGSFFLVSKLTVDKSRWQQG | | |
| | | | MVFSCSVMHEALHNHYTQKSLSLSP | | |
| | | | G | | |
| | | | (SEQ | | |
| | | | ID | | |
| | | | NO: 9) | | |
| AK439 | DNA158 | Hole: | DKTHTCPPCPAPELLGGPSVFLFPP | | |
| | | hFc(N297A) | KPKDTLMISRTPEVTCVVVDVSHED | | |
| | | | PEVKFNWYVDGVEVHNAKTKPREEQ | | |
| | | | YASTYRVVSVLTVLHQDWLNGKEYK | | |
| | | | CKVSNKALPAPIEKTISKAKGQPRE | | |
| | | | PQVCTLPPSRDELTKNQVSLSCAVK | | |
| | | | GFYPSDIAVEWESNGQPENNYKTTP | | |
| | | | PVLDSDGSFFLVSKLTVDKSRWQQG | | |
| | | | MVFSCSVMHEALHNHYTQKSLSLSP | | |
| | | | G | | |
| | | | (SEQ | | |
| | | | ID | | |
| | | | NO: 9) | | |
| AK439 | DNA544 | Knob: | DKTHTCPPCPAPELLGGPSVFLFPP | GSPG | VPLSLY |
| | | hFc(N297A)- | KPKDTLMISRTPEVTCVVVDVSHED | (SEQ ID | (SEQ ID |
| | | [VPLSLY]- | PEVKFNWYVDGVEVHNAKTKPREEQ | NO: 34) | NO: 28) |
| | | hIL2 | YASTYRVVSVLTVLHQDWLNGKEYK | | |
| | | (R38A, F42A, | CKVSNKALPAPIEKTISKAKGQPRE | | |
| | | Y45A, E62A, | PQVYTLPPCRDELTKNQVSLWCLVK | | |
| | | L80F, RS3D, | GFYPSDIAVEWESNGQPENNYKTTP | | |
| | | L85V, 186V, | PVLDSDGSFFLYSKLTVDKSRWQQG | | |
| | | I92F, C125A) | NVFSCSVMHEALHNHYTQKSLSLSP | | |
| | | | G | | |
| | | | (SEQ | | |
| | | | ID | | |
| | | | NO: 12) | | |
| AK440 | DNA187 | Hole: | DKTHTCPPCPAPELLGGPSVFLFPP | PGSGS | AVNGTSQFTCFYNSRANISCVWSQD |
| | | hFc(N297A)- | KPKDTLMISRTPEVTCVVVDVSHED | (SEQ ID | GALQDTSCQVHAWPDRRRWNQTCEL |
| | | hCD122 | PEVKFNWYVDGVEVHNAKTKPREEQ | NO: 14) | LFVSQASWACNLILGAPDSQKLTTV |
| | | | YASTYRVVSVLTVLHQDWLNGKEYK | | DIVTLRVLCREGVRWRVMAIQDFKP |
| | | | CKVSNKALPAPIEKTISKAKGQPRE | | FENLRLMAPISLQVVHVETHRCNIS |
| | | | PQVCTLPPSRDELTKNQVSLSCAVK | | WEISQASHYFERHLEFEARTLSPGH |
| | | | GFYPSDIAVEWESNGQPENNYKTTP | | TWEEAPLLTLKQKQEWICLETLTPD |
| | | | PVLDSDGSFFLVSKLTVDKSRWQQG | | TQYEFQVRVKPLQGEFTTWSPWSQP |
| | | | MVFSCSVMHEALHNHYTQKSLSLSP | | LAFRTKPAALGKD |
| | | | G | | (SEQ ID |
| | | | (SEQ | | NO: 4) |
| | | | ID | | |
| | | | NO: 9) | | |
| AK440 | DNA544 | Knob: | DKTHTCPPCPAPELLGGPSVFLFPP | GSPG | VPLSLY |
| | | hFc(N297A)- | KPKDTLMISRTPEVTCVVVDVSHED | (SEQ ID | (SEQ ID |
| | | [VPLSLY]- | PEVKFNWYVDGVEVHNAKTKPREEQ | NO: 34) | NO: 28) |
| | | hIL2 | YASTYRVVSVLTVLHQDWLNGKEYK | | |
| | | (R38A, F42A, | CKVSNKALPAPIEKTISKAKGQPRE | | |
| | | Y45A, E62A, | PQVYTLPPCRDELTKNQVSLWCLVK | | |
| | | L80F, RS3D, | GFYPSDIAVEWESNGQPENNYKTTP | | |
| | | L85V, 186V, | PVLDSDGSFFLYSKLTVDKSRWQQG | | |
| | | I92F, C125A) | NVFSCSVMHEALHNHYTQKSLSLSP | | |
| | | | G | | |
| | | | (SEQ | | |
| | | | ID | | |
| | | | NO: 12) | | |
| AK441 | DNA543 | Hole: | DKTHTCPPCPAPELLGGPSVFLFPP | GPPSG | VPLSLY |
| | | hFc(N297A)- | KPKDTLMISRTPEVTCVVVDVSHED | SSPG | (SEQ ID |
| | | [VPLSLY]- | PEVKFNWYVDGVEVHNAKTKPREEQ | (SEQ ID | NO: 28) |
| | | hCD122 | YASTYRVVSVLTVLHQDWLNGKEYK | NO: 36) | |
| | | | CKVSNKALPAPIEKTISKAKGQPRE | | |
| | | | PQVCTLPPSRDELTKNQVSLSCAVK | | |
| | | | GFYPSDIAVEWESNGQPENNYKTTP | | |
| | | | PVLDSDGSFFLVSKLTVDKSRWQQG | | |
| | | | MVFSCSVMHEALHNHYTQKSLSLSP | | |
| | | | G | | |
| | | | (SEQ | | |
| | | | ID | | |
| | | | NO: 9) | | |
| AK441 | DNA546 | Knob: | DKTHTCPPCPAPELLGGPSVFLFPP | GGSSP | APTSSSTKKTQLQLEHLLLDLQMIL |
| | | hFc(N297A)- | KPKDTLMISRTPEVTCVVVDVSHED | PGGG | NGINNYKNPKLTAMLTAKFAMPKKA |
| | | hIL2 | PEVKFNWYVDGVEVHNAKTKPREEQ | SSGG | TELKHLQCLEEALKPLEEVLNLAQS |
| | | (R38A, F42A, | YASTYRVVSVLTVLHQDWLNGKEYK | GSGP | KNFHFDPRDWSNINVFVLELKGSET |
| | | Y45A, E62A, | CKVSNKALPAPIEKTISKAKGQPRE | (SEQ ID | TFMCEYADETATIVEFLNRWITFAQ |
| | | L80F, RS3D, | PQVYTLPPCRDELTKNQVSLWCLVK | NO: 23) | SIISTLT |
| | | L85V, 186V, | GFYPSDIAVEWESNGQPENNYKTTP | | (SEQ ID |
| | | I92F, C125A) | PVLDSDGSFFLYSKLTVDKSRWQQG | | NO: 328) |
| | | | NVFSCSVMHE | | |
| | | | ALHNHYTQKSLSLSPG | | |
| | | | (SEQ | | |
| | | | ID | | |
| | | | NO: 12) | | |
| AK442 | DNA255 | Knob: | DKTHTCPPCPAPELLGGPSVFLFPP | GGSSPP | APTSSSTKKTQLQLEHLLLDLQMIL |
| | | hFc(N297A)- | KPKDTLMISRTPEVTCVVVDVSHED | GGGSS | NGINNYKNPKLTAMLTAKFAMPKKA |
| | | hIL2(R38A, | PEVKFNWYVDGVEVHNAKTKPREEQ | GG | TELKHLQCLEEALKPLEEVLNLAQS |
| | | F42A, Y45A, | YASTYRVVSVLTVLHQDWLNGKEYK | GSGP | KNFHLRPRDLISNINVIVLELKGSE |
| | | E62A, C125A) | CKVSNKALPAPIEKTISKAKGQPRE | (SEQ ID | TTFMCEYADETATIVEFLNRWITFA |
| | | | PQVYTLPPCRDELTKNQVSLWCLVK | NO: 23) | QSIISTLT |
| | | | GFYPSDIAVEWESNGQPENNYKTTP | | (SEQ ID |
| | | | PVLDSDGSFFLYSKLTVDKSRWQQG | | NO: 3) |
| | | | NVFSCSVMHEALHNHYTQKSLSLSP | | |
| | | | G | | |
| | | | (SEQ | | |
| | | | ID | | |
| | | | NO: 12) | | |
| AK442 | DNA553 | Hole: | DKTHTCPPCPAPELLGGPSVFLFPP | GPPS | DSGGFMLT |
| | | hFc(N297A)- | KPKDTLMISRTPEVTCVVVDVSHED | GSSPG | (SEQ ID |
| | | [DSGGFMLT]- | PEVKFNWYVDGVEVHNAKTKPREEQ | (SEQ ID | NO: 25) |
| | | hCD122 | YASTYRVVSVLTVLHQDWLNGKEYK | NO: 36) | |
| | | | CKVSNKALPAPIEKTISKAKGQPRE | | |
| | | | PQVCTLPPSRDELTKNQVSLSCAVK | | |
| | | | GFYPSDIAVEWESNGQPENNYKTTP | | |
| | | | PVLDSDGSFFLVSKLTVDKSRWQQG | | |
| | | | MVFSCSVMHEALHNHYTQKSLSLSP | | |
| | | | G | | |
| | | | (SEQ | | |
| | | | ID | | |
| | | | NO: 9) | | |
| AK443 | DNA187 | Hole: | DKTHTCPPCPAPELLGGPSVFLFPP | PGSGS | AVNGTSQFTCFYNSRANISCVWSQD |
| | | hFc(N297A)- | KPKDTLMISRTPEVTCVVVDVSHED | (SEQ ID | GALQDTSCQVHAWPDRRRWNQTCEL |
| | | hCD122 | PEVKFNWYVDGVEVHNAKTKPREEQ | NO: 14) | LFVSQASWACNLILGAPDSQKLTTV |
| | | | YASTYRVVSVLTVLHQDWLNGKEYK | | DIVTLRVLCREGVRWRVMAIQDFKP |
| | | | CKVSNKALPAPIEKTISKAKGQPRE | | FENLRLMAPISLQVVHVETHRCNIS |
| | | | PQVCTLPPSRDELTKNQVSLSCAVK | | WEISQASHYFERHLEFEARTLSPGH |
| | | | GFYPSDIAVEWESNGQPENNYKTTP | | TWEEAPLLTLKQKQEWICLETLTPD |
| | | | PVLDSDGSFFLVSKLTVDKSRWQQG | | TQYEFQVRVKPLQGEFTTWSPWSQP |
| | | | MVFSCSVMHEALHNHYTQKSLSLSP | | LAFRTKPAALGKD |
| | | | G | | (SEQ ID |
| | | | (SEQ | | NO: 4) |
| | | | ID | | |
| | | | NO: 9) | | |
| AK443 | DNA554 | Knob: | DKTHTCPPCPAPELLGGPSVFLFPP | GSPG | VPLSLY |
| | | hFc(N297A)- | KPKDTLMISRTPEVTCVVVDVSHED | (SEQ ID | (SEQ ID |
| | | [VPLSLY]- | PEVKFNWYVDGVEVHNAKTKPREEQ | NO: 34) | NO: 28) |
| | | hIL2(E15R, | YASTYRVVSVLTVLHQDWLNGKEYK | | |
| | | L18C, D20R, | CKVSNKALPAPIEKTISKAKGQPRE | | |
| | | R38A, | PQVYTLPPCRDELTKNQVSLWCLVK | | |
| | | F42A, Y45A, | GFYPSDIAVEWESNGQPENNYKTTP | | |
| | | E62A) | PVLDSDGSFFLYSKLTVDKSRWQQG | | |
| | | | NVFSCSVMHEALHNHYTQKSLSLSP | | |
| | | | G | | |
| | | | (SEQ | | |
| | | | ID | | |
| | | | NO: 12) | | |
| AK444 | DNA281 | Knob: | DKTHTCPPCPAPELLGGPSVFLFPP | GSGP | DSGGFMLT |
| | | hFc(N297A)- | KPKDTLMISRTPEVTCVVVDVSHED | (SEQ ID | (SEQ ID |
| | | [VPLSLY]- | PEVKFNWYVDGVEVHNAKTKPREEQ | NO: 33) | NO: 25) |
| | | hIL2(R38A, | YASTYRVVSVLTVLHQDWLNGKEYK | | |
| | | F42A, Y45A, | CKVSNKALPAPIEKTISKAKGQPRE | | |
| | | E62A, C125A) | PQVYTLPPCRDELTKNQVSLWCLVK | | |
| | | | GFYPSDIAVEWESNGQPENNYKTTP | | |
| | | | PVLDSDGSFFLYSKLTVDKSRWQQG | | |
| | | | NVFSCSVMHEALHNHYTQKSLSLSP | | |
| | | | G | | |
| | | | (SEQ | | |
| | | | ID | | |
| | | | NO: 12) | | |
| AK444 | DNA440 | Hole: | DKTHTCPPCPAPELLGGPSVFLFPP | PGSGS | AVNGTSQFTCFYNSRANISCVWSQD |
| | | hFc(N297A)- | KPKDTLMISRTPEVTCVVVDVSHED | (SEQ ID | GALQDTSCQVHAWPDRRRWNQTCEL |
| | | hCD122 | PEVKFNWYVDGVEVHNAKTKPREEQ | NO: 14) | LPVSQASWACNLILGAPDSQKLTTV |
| | | (C122S, C168S) | YASTYRVVSVLTVLHQDWLNGKEYK | | DIVTLRVLCREGVRWRVMAIQPFKP |
| | | | CKVSNKALPAPIEKTISKAKGQPRE | | FENLRLMAPISLQVVHVETHRSNIS |
| | | | PQVCTLPPSRDELTKNQVSLSCAVK | | WEISQASHYFERHLEFEARTLSPGH |
| | | | GFYPSDIAVEWESNGQPENNYKTTP | | TWEEAPLLTLKQKQEWISLETLTPD |
| | | | PVLDSDGSFFLVSKLTVDKSRWQQG | | TQYEFQVRVKPLQGEFTTWSPWSQP |
| | | | MVFSCSVMHEALHNHYTQKSLSLSP | | LAFRTKPAALGKD |
| | | | G | | (SEQ ID |
| | | | (SEQ | | NO: 5) |
| | | | ID | | |
| | | | NO: 9) | | |
| AK449 | DNA547 | Hole: | EPKSSDKTHTCPPCPAPELLGGPSV | PGSGS | AVNGTSQFTCFYNSRANISCVWSQD |
| | | hFcIgG1 | FLFPPKPKDTLMISRTPEVTCVVVD | (SEQ ID | GALQDTSCQVHAWPDRRRWNQTCEL |
| | | (N297A + EPKSS)- | VSHEDPEVKFNWYVDGVEVHNAKTK | NO: 14) | LFVSQASWACNLILGAPDSQKLTTV |
| | | Hole: | PREEQYASTYRVVSVLTVLHQDWLN | | DIVTLRVLCREGVRWRVMAIQDFKP |
| | | hFc(N297A)- | GKEYKCKVSNKALPAPIEKTISKAK | | FENLRLMAPISLQVVHVETHRCNIS |
| | | hCD122 | GQPREPQVCTLPPSRDELTKNQVSL | | WEISQASHYFERHLEFEARTLSPGH |
| | | | SCAVKGFYPSDIAVEWESNGQPENN | | TWEEAPLLTLKQKQEWICLETLTPD |
| | | | YKTTPPVLDSDGSFFLVSKLTVDKS | | TQYEFQVRVKPLQGEFTTWSPWSQP |
| | | | RWQQGNVFSCSVMHEALHNHYTQKS | | LAFRTKPAALGKD |
| | | | LSLSPG | | (SEQ ID NO: 4) |
| | | | (SEQ | | |
| | | | ID | | |
| | | | NO: 285) | | |
| AK449 | DNA550 | Knob: | EPKSSDKTHTCPPCPAPELLGGPSV | GSPG | VPLSLY |
| | | hFcIgG1 | FLFPPKPKDTLMISRTPEVTCVVVD | (SEQ ID | (SEQ ID |
| | | (N297A + EPKSS)- | VSHEDPEVKFNWYVDGVEVHNAKTK | NO: 34) | NO: 28) |
| | | hIL2(R38A, | PREEQYASTYRVVSVLTVLHQDWLN | | |
| | | F42A, Y45A, | GKEYKCKVSNKALPAPIEKTISKAK | | |
| | | E62A, C125A) | GQPREPQVYTLPPCRDELTKNQVSL | | |
| | | | WCLVKGFYPSDIAVEWESNGQPENN | | |
| | | | NYKTTPPVLDSDGSFFLYSKLTVDK | | |
| | | | SRWQQGNVFSCSVMHEALHNHYTQK | | |
| | | | SLSLSPG | | |
| | | | (SEQ | | |
| | | | ID | | |
| | | | NO: 288) | | |
| AK450 | DNA548 | Hole: | AKTDKTHTCPPCPAPELLGGPSVFL | PGSGS | AVNGTSQFTCFYNSRANISCVWSQD |
| | | hFcIgG1 | FPPKPKDTLMISRTPEVTCVVVDVS | (SEQ ID | GALQDTSCQVHAWPDRRRWNQTCEL |
| | | (N297A + AKT)- | HEDPEVKFNWYVDGVEVHNAKTKPR | NO: 14) | LFVSQASWACNLILGAPDSQKLTTV |
| | | Hole: | EEQYASTYRVVSVLTVLHQPWLNGK | | DIVTLRVLCREGVRWRVMAIQDFKP |
| | | hFc(N297A)- | EYKCKVSNKALPAPIEKTISKAKGQ | | FENLRLMAPISLQVVHVETHRCNIS |
| | | hCD122 | PREPQVCTLPPSRDELTKP | | WEISQASHYFERHLEFEARTLSPGH |
| | | | NQVSLSCAVKGFYPSDIAVEWESNG | | TWEEAPLLTLKQKQEWICLETLTPD |
| | | | QPENNYKTTPPVLDSDGSFFLYSKL | | TQYEFQVRVKPLQGEFTTWSPWSQP |
| | | | TVDKSRWQQGNVFSCSVMHEALHNH | | LAFRTKPAALGKD |
| | | | YTQKSLSLSPG | | (SEQ ID |
| | | | (SEQ | | NO: 4) |
| | | | ID | | |
| | | | NO: 286) | | |
| AK450 | DNA551 | Knob: | AKTDKTHTCPPCPAPELLGGPSVFL | GSPG | VPLSLY |
| | | hFcIgG1 | FPPKPKDTLMISRTPEVTCVVVDVS | (SEQ ID | (SEQ ID |
| | | (N297A + AKT)- | HEDPEVKFNWYVDGVEVHNAKTKPR | NO: 34) | NO: 28) |
| | | [VPLSLY]- | EEQYASTYRVVSVLTVLHQDWLNGK | | |
| | | hIL2(R38A, | EYKCKVSNKALPAPIEKTISKAKGQ | | |
| | | F42A, Y45A, | PREPQVYTLPPCRDELTKNQVSLWC | | |
| | | E62A, C125A) | LVKGFYPSDIAVEWESNGQPENNYK | | |
| | | | TTPPVLDSDGSFFLYSKLTVDKSRW | | |
| | | | QQGNVFSCSVMHEALHNHYTQKSLS | | |
| | | | LSPG | | |
| | | | (SEQ | | |
| | | | ID | | |
| | | | NO: 289) | | |
| AK451 | DNA549 | Hole: | AKTEPKSSDKTHTCPPCPAPELLGG | PGSGS | AVNGTSQFTCFYNSRANISCVWSQD |
| | | hFcIgG1 | PSVFLFPPKPKDVLMISRTPEVTCV | (SEQ ID | GALQDTSCQVHAWPDRRRWNQTCEL |
| | | (N297A | VVDVSHEDPEVKFNWYVDGVEVHNA | NO: 14) | LFVSQASWACNLILGAPDSQKLTTV |
| | | AKTEPKSS)- | CTKPREEQYASTYRVVSVLTVLHQD | | DIVTLRVLCREGVRWRVMAIQDFKP |
| | | hCD122 | WLNGKEYKCKVSNKALPAPIEICTI | | FENLRLMAPISLQVVHVETHRCNIS |
| | | | SKAKGQPREPQVCTLPPSRDELTKN | | WEISQASHYFERHLEFEARTLSPGH |
| | | | QVSLSCAVKGFYPSDIAVEWESNGQ | | TWEEAPLLTLKQKQEWICLETLTPD |
| | | | PENNYKTTPPVLDSDG | | TQYEFQVRVKPLQGEFTTWSPWSQP |
| | | | SFFLVSKLTVDKSRWQQGNVFSCSV | | LAFRTKPAALGKD |
| | | | MHEALHNHYTQKSLSLSPG | | (SEQ ID NO: 4) |
| | | | (SEQ | | |
| | | | ID | | |
| | | | NO: 287) | | |
| AK451 | DNA552 | Knob: | AKTFPKSSDKTFITCPPCPAPELLG | GSPG | VPLSLY |
| | | hFcIgG1 | GPSVFLFPPKPKDTLMISRTPEVTC | (SEQ ID | (SEQ ID |
| | | (N297A | VVVDVSHEDPEVKFNWYVDGVEVHN | NO: 34) | NO: 28) |
| | | AKTAKTEPKSS)- | AKTKPREEQYASTYRWSVLTVLHQD | | |
| | | [VPLSLY]- | WLNGKEYKCKVSNKALPAPIEKTI | | |
| | | hIL2(R38A, | SKAKGQPREPQVYTLPPCRDELTKN | | |
| | | F42A, Y45A, | QVSLWCLVKGFYPSDIAVEWESNGQ | | |
| | | E62A, C125A) | PENNYKTTPPVLDSDGSFFLYSKLT | | |
| | | | VDKSRWQQGNVFSCSVMHEALHNHY | | |
| | | | TQKSLSLSPG | | |
| | | | (SEQ | | |
| | | | ID | | |
| | | | NO: 290) | | |
| AK452 | DNA187 | Hole: | DKTHTCPPCPAPELLGGPSVFLFPP | PGSGS | AVNGTSQFTCFYNSRANISCVWSQD |
| | | hFc(N297A)- | KPKDTLMISRTPEVTCVVVDVSHED | (SEQ ID | GALQDTSCQVHAWPDRRRWNQTCEL |
| | | hCD122 | PEVKFNWYVDGVEVHNAKTKPREEQ | NO: 14) | LFVSQASWACNLILGAPDSQKLTTV |
| | | | YASTYRVVSVLTVLHQDWLNGKEYK | | DIVTLRVLCREGVRWRVMAIQDFKP |
| | | | CKVSNKALPAPIEKTISKAKGQPRE | | FENLRLMAPISLQVVHVETHRCNIS |
| | | | PQVCTLPPSRDELTKNQVSLSCAVK | | WEISQASHYFERHLEFEARTLSPGH |
| | | | GFYPSDIAVEWESNGQPENNYKTTP | | TWEEAPLLTLKQKQEWICLETLTPD |
| | | | PVLDSDGSFFLVSKLTVDKSRWQQG | | TQYEFQVRVKPLQGEFTTWSPWSQP |
| | | | MVFSCSVMHEALHNHYTQKSLSLSP | | LAFRTKPAALGKD |
| | | | G | | (SEQ ID NO: 4) |
| | | | (SEQ | | |
| | | | ID | | |
| | | | NO: 9) | | |
| AK452 | DNA563 | Knob: | DKTHTCPPCPAPELLGGPSVFLFPP | GSPG | VPLSLY |
| | | hFc(N297A)- | KPKDTLMISRTPEVTCVVVDVSHED | (SEQ ID | (SEQ ID |
| | | [VPLSLY]- | PEVKFNWYVDGVEVHNAKTKPREEQ | NO: 34) | NO: 28) |
| | | hIL2(E15R, | YASTYRVVSVLTVLHQDWLNGKEYK | | |
| | | L18C, D20R, | CKVSNKALPAPIEKTISKAKGQPRE | | |
| | | R38A, | PQVYTLPPCRDELTKNQVSLWCLVK | | |
| | | F42A, Y45A, | GFYPSDIAVEWESNGQPENNYKTTP | | |
| | | E62A) | PVLDSDGSFFLYSKLTVDKSRWQQG | | |
| | | | NVFSCSVMHEALHNHYTQKSLSLSP | | |
| | | | G | | |
| | | | (SEQ | | |
| | | | ID | | |
| | | | NO: 12) | | |
| AK453 | DNA187 | Hole: | DKTHTCPPCPAPELLGGPSVFLFPP | PGSGS | AVNGTSQFTCFYNSRANISCVWSQD |
| | | hFc(N297A)- | KPKDTLMISRTPEVTCVVVDVSHED | (SEQ ID | GALQDTSCQVHAWPDRRRWNQTCEL |
| | | hCD122 | PEVKFNWYVDGVEVHNAKTKPREEQ | NO: 14) | LFVSQASWACNLILGAPDSQKLTTV |
| | | | YASTYRVVSVLTVLHQDWLNGKEYK | | DIVTLRVLCREGVRWRVMAIQDFKP |
| | | | CKVSNKALPAPIEKTISKAKGQPRE | | FENLRLMAPISLQVVHVETHRCNIS |
| | | | PQVCTLPPSRDELTKNQVSLSCAVK | | WEISQASHYFERHLEFEARTLSPGH |
| | | | GFYPSDIAVEWESNGQPENNYKTTP | | TWEEAPLLTLKQKQEWICLETLTPD |
| | | | PVLDSDGSFFLVSKLTVDKSRWQQG | | TQYEFQVRVKPLQGEFTTWSPWSQP |
| | | | MVFSCSVMHEALHNHYTQKSLSLSP | | LAFRTKPAALGKD |
| | | | G | | (SEQ ID NO: 4) |
| | | | (SEQ | | |
| | | | ID | | |
| | | | NO: 9) | | |
| AK453 | DNA565 | Knob: | DKTHTCPPCPAPELLGGPSVFLFPP | GSPG | VPLSLY |
| | | hFc(N297A)- | KPKDTLMISRTPEVTCVVVDVSHED | | (SEQ ID |
| | | [VPLSLY]- | PEVKFNWYVDGVEVHNAKTKPREEQ | | NO: 28) |
| | | hIL2(E15L, | YASTYRVVSVLTVLHQDWLNGKEYK | | |
| | | L18C, D20R, | CKVSNKALPAPIEKTISKAKGQPRE | | |
| | | R38A, | PQVYTLPPCRDELTKNQVSLWCLVK | | |
| | | F42A, Y45A, | GFYPSDIAVEWESNGQPENNYKTTP | | |
| | | E62A) | PVLDSDGSFFLYSKLTVDKSRWQQG | (SEQ ID | |
| | | | NVFSCSVMHEALHNHYTQKSLSLSP | NO: 34) | |
| | | | G | | |
| | | | (SEQ | | |
| | | | ID | | |
| | | | NO: 12) | | |
| AK454 | DNA187 | Hole: | DKTHTCPPCPAPELLGGPSVFLFPP | PGSGS | AVNGTSQFTCFYNSRANISCVWSQD |
| | | hFc(N297A)- | KPKDTLMISRTPEVTCVVVDVSHED | (SEQ ID | GALQDTSCQVHAWPDRRRWNQTCEL |
| | | hCD122 | PEVKFNWYVDGVEVHNAKTKPREEQ | NO: 14) | LFVSQASWACNLILGAPDSQKLTTV |
| | | | YASTYRVVSVLTVLHQDWLNGKEYK | | DIVTLRVLCREGVRWRVMAIQDFKP |
| | | | CKVSNKALPAPIEKTISKAKGQPRE | | FENLRLMAPISLQVVHVETHRCNIS |
| | | | PQVCTLPPSRDELTKNQVSLSCAVK | | WEISQASHYFERHLEFEARTLSPGH |
| | | | GFYPSDIAVEWESNGQPENNYKTTP | | TWEEAPLLTLKQKQEWICLETLTPD |
| | | | PVLDSDGSFFLVSKLTVDKSRWQQG | | TQYEFQVRVKPLQGEFTTWSPWSQP |
| | | | MVFSCSVMHEALHNHYTQKSLSLSP | | LAFRTKPAALGKD |
| | | | G | | (SEQ ID NO: 4) |
| | | | (SEQ | | |
| | | | ID | | |
| | | | NO: 9) | | |
| AK454 | DNA566 | Knob: | DKTHTCPPCPAPELLGGPSVFLFPP | GSPG | VPLSLY |
| | | hFc(N297A)- | KPKDTLMISRTPEVTCVVVDVSHED | (SEQ ID | (SEQ ID |
| | | [VPLSLY]- | PEVKFNWYVDGVEVHNAKTKPREEQ | NO: 34) | NO: 28) |
| | | hIL2(E15R, | YASTYRVVSVLTVLHQDWLNGKEYK | | |
| | | L18C, D20R, | CKVSNKALPAPIEKTISKAKGQPRE | | |
| | | R38A, | PQVYTLPPCRDELTKNQVSLWCLVK | | |
| | | F42A, Y45A, | GFYPSDIAVEWESNGQPENNYKTTP | | |
| | | E62A) | PVLDSDGSFFLYSKLTVDKSRWQQG | | |
| | | | NVFSCSVMHEALHNHYTQKSLSLSP | | |
| | | | G | | |
| | | | (SEQ | | |
| | | | ID | | |
| | | | NO: 12) | | |
| AK455 | DNA187 | Hole: | DKTHTCPPCPAPELLGGPSVFLFPP | PGSGS | AVNGTSQFTCFYNSRANISCVWSQD |
| | | hFc(N297A)- | KPKDTLMISRTPEVTCVVVDVSHED | (SEQ ID | GALQDTSCQVHAWPDRRRWNQTCEL |
| | | hCD122 | PEVKFNWYVDGVEVHNAKTKPREEQ | NO: 14) | LFVSQASWACNLILGAPDSQKLTTV |
| | | | YASTYRVVSVLTVLHQDWLNGKEYK | | DIVTLRVLCREGVRWRVMAIQDFKP |
| | | | CKVSNKALPAPIEKTISKAKGQPRE | | FENLRLMAPISLQVVHVETHRCNIS |
| | | | PQVCTLPPSRDELTKNQVSLSCAVK | | WEISQASHYFERHLEFEARTLSPGH |
| | | | GFYPSDIAVEWESNGQPENNYKTTP | | TWEEAPLLTLKQKQEWICLETLTPD |
| | | | PVLDSDGSFFLVSKLTVDKSRWQQG | | TQYEFQVRVKPLQGEFTTWSPWSQP |
| | | | MVFSCSVMHEALHNHYTQKSLSLSP | | LAFRTKPAALGKD |
| | | | G | | (SEQ ID NO: 4) |
| | | | (SEQ | | |
| | | | ID | | |
| | | | NO: 9) | | |
| AK455 | DNA567 | Knob: | DKTHTCPPCPAPELLGGPSVFLFPP | GSPG | VPLSLY |
| | | hFc(N297A)- | KPKDTLMISRTPEVTCVVVDVSHED | (SEQ ID | (SEQ ID |
| | | [VPLSLY]- | PEVKFNWYVDGVEVHNAKTKPREEQ | NO: 34) | NO: 28) |
| | | hIL2 | YASTYRVVSVLTVLHQDWLNGKEYK | | |
| | | (L18C, D20R, | CKVSNKALPAPIEKTISKAKGQPRE | | |
| | | R38A, | PQVYTLPPCRDELTKNQVSLWCLVK | | |
| | | F42A, Y45A, | GFYPSDIAVEWESNGQPENNYKTTP | | |
| | | E62A) | PVLDSDGSFFLYSKLTVDKSRWQQG | | |
| | | | NVFSCSVMHEALHNHYTQKSLSLSP | | |
| | | | G | | |
| | | | (SEQ | | |
| | | | ID | | |
| | | | NO: 12) | | |
| AK456 | DNA187 | Hole: | DKTHTCPPCPAPELLGGPSVFLFPP | PGSGS | AVNGTSQFTCFYNSRANISCVWSQD |
| | | hFc(N297A)- | KPKDTLMISRTPEVTCVVVDVSHED | (SEQ ID | GALQDTSCQVHAWPDRRRWNQTCEL |
| | | hCD122 | PEVKFNWYVDGVEVHNAKTKPREEQ | NO: 14) | LFVSQASWACNLILGAPDSQKLTTV |
| | | | YASTYRVVSVLTVLHQDWLNGKEYK | | DIVTLRVLCREGVRWRVMAIQDFKP |
| | | | CKVSNKALPAPIEKTISKAKGQPRE | | FENLRLMAPISLQVVHVETHRCNIS |
| | | | PQVCTLPPSRDELTKNQVSLSCAVK | | WEISQASHYFERHLEFEARTLSPGH |
| | | | GFYPSDIAVEWESNGQPENNYKTTP | | TWEEAPLLTLKQKQEWICLETLTPD |
| | | | PVLDSDGSFFLVSKLTVDKSRWQQG | | TQYEFQVRVKPLQGEFTTWSPWSQP |
| | | | MVFSCSVMHEALHNHYTQKSLSLSP | | LAFRTKPAALGKD |
| | | | G | | (SEQ ID NO: 4) |
| | | | (SEQ | | |
| | | | ID | | |
| | | | NO: 9) | | |
| AK456 | DNA568 | Knob: | DKTHTCPPCPAPELLGGPSVFLFPP | GSPG | VPLSLY |
| | | hFc(N297A)- | KPKDTLMISRTPEVTCVVVDVSHED | (SEQ ID | (SEQ ID |
| | | [VPLSLY]- | PEVKFNWYVDGVEVHNAKTKPREEQ | NO: 34) | NO: 28) |
| | | hIL2(E15F, | YASTYRVVSVLTVLHQDWLNGKEYK | | |
| | | L18C, D20R, | CKVSNKALPAPIEKTISKAKGQPRE | | |
| | | R38A, | PQVYTLPPCRDELTKNQVSLWCLVK | | |
| | | F42A, Y45A, | GFYPSDIAVEWESNGQPENNYKTTP | | |
| | | E62A) | PVLDSDGSFFLYSKLTVDKSRWQQG | | |
| | | | NVFSCSVMHEALHNHYTQKSLSLSP | | |
| | | | G | | |
| | | | (SEQ | | |
| | | | ID | | |
| | | | NO: 12) | | |
| AK462 | DNA530 | Knob: | VRSGCKPCICTVPEVSSVFIFPPKP | GGSSPPG | APTSSSTKKTQLQLEHLLLDLQMIL |
| | | mFcIgG1 | KDVLTITLTPKVTCVVVAISKDDPE | GGSSGG | NGINNYKNPKLTAMLTAKFAMPKKA |
| | | (DAPG)- | VQFSWFVDDVEVHTAQTQPREEQFN | GSGP | TELKHLQCLEEALKPLEEVLNLAQS |
| | | hIL2(R38A, | STFRSVSELPIMHQDWLKGKEFKCR | (SEQ ID | KNFHLRPRDLISNINVIVLELKGSE |
| | | F42A, Y45A, | VNSAAFGAPIEKTISKTKGRPKAPQ | NO: 23) | TTFMCEYADETATIVEFLNRWITFA |
| | | E62A) | VYTIPPPKEQMAKDKVSLTCMITDF | | QSIISTLT |
| | | | FPEDITVEWQWNGQPAENYDNTQPI | | (SEQ ID |
| | | | MDTDGSYFVYSDLNVQKSNWEAGNT | | NO: 3) |
| | | | FTCSVLHEGLHNHHTEKSLSHSPG | | |
| | | | (SEQ | | |
| | | | ID | | |
| | | | NO: 283) | | |
| AK462 | DNA532 | Hole: | VRSGCKPCICTVPEVSSVFIFPPKP | | |
| | | mFcIgG1 | KDVLTITLTPKVTCVVVAISKDDPE | | |
| | | (DAPG) | VQFSWFVDDVEVHTAQTQPREEQFN | | |
| | | | STFRSVSELPIMHQDWLKGKEFKCR | | |
| | | | VNSAAFGAPIEKTISKTKGRPKAPQ | | |
| | | | VYTIPPPKKQMAKDKVSLTCMITDF | | |
| | | | FPEDITVEWQWNGQPAENYKNTQPI | | |
| | | | MKTDGSYFVYSKLNVQKSNWEAGNT | | |
| | | | FTCSVLHEGLHNHHTEKSLSHSPG | | |
| | | | (SEQ | | |
| | | | ID | | |
| | | | NO: 284) | | |
| AK463 | DNA530 | Knob: | VRSGCKPCICTVPEVSSVFIFPPKP | GSSPPG | APTSSSTKKTQLQLEHLLLDLQMIL |
| | | mFcIgG1 | KDVLTITLTPKVTCVVVAISKDDPE | GGSSGG | NGINNYKNPKLTAMLTAKFAMPKKA |
| | | (DAPG)- | VQFSWFVDDVEVHTAQTQPREEQFN | GSGP | TELKHLQCLEEALKPLEEVLNLAQS |
| | | hIL2(R38A, | STFRSVSELPIMHQDWLKGKEFKCR | (SEQ ID | KNFHLRPRDLISNINVIVLELKGSE |
| | | F42A, Y45A, | VNSAAFGAPIEKTISKTKGRPKAPQ | NO: 23) | TTFMCEYADETATIVEFLNRWITFA |
| | | E62A) | VYTIPPPKEQMAKDKVSLTCMITDF | | QSIISTLT |
| | | | FPEDITVEWQWNGQPAENYDNTQPI | | (SEQ ID |
| | | | MDTDGSYFVYSDLNVQKSNWEAGNT | | NO: 3) |
| | | | FTCSVLHEGLHNHHTEKSLSHSPG | | |
| | | | (SEQ | | |
| | | | ID | | |
| | | | NO: 283) | | |
| AK463 | DNA533 | Hole: mFcIgG1 | VRSGCKPCICTVPEVSSVFIFPPKP | PGSGS | AVNGTSQFTCFYNSRANISCVWSQD |
| | | (DAPG)- | KDVLTITLTPKVTCVVVAISKDDPE | (SEQ ID | GALQDTSCQVHAWPDRRRWNQTCEL |
| | | hCD122 | VQFSWFVDDVEVHTAQTQPREEQFN | NO: 14) | LFVSQASWACNLILGAPDSQKLTTV |
| | | | STFRSVSELPIMHQDWLKGKEFKCR | | DIVTLRVLCREGVRWRVMAIQDFKP |
| | | | VNSAAFGAPIEKTISKTKGRPKAPQ | | FENLRLMAPISLQVVHVETHRCNIS |
| | | | VYTIPPPKKQMAKDKVSLTCMITDF | | WEISQASHYFERHLEFEARTLSPGH |
| | | | FPEDITVEWQWNGQPAENYKNTQPI | | TWEEAPLLTLKQKQEWICLETLTPD |
| | | | MKTDGSYFVYSKLNVQKSNWEAGNT | | TQYEFQVRVKPLQGEFTTWSPWSQP |
| | | | FTCSVLHEGLHNHHTEKSLSHSPG | | LAFRTKPAALGKD |
| | | | (SEQ | | (SEQ ID NO: 4) |
| | | | ID | | |
| | | | NO: 284) | | |
| AK464 | DNA530 | Knob: | VRSGCKPCICTVPEVSSVFIFPPKP | GSSPPG | APTSSSTKKTQLQLEHLLLDLQMIL |
| | | mFcIgG1 | KDVLTITLTPKVTCVVVAISKDDPE | GGSSGG | NGINNYKNPKLTAMLTAKFAMPKKA |
| | | (DAPG)- | VQFSWFVDDVEVHTAQTQPREEQFN | GSGP | TELKHLQCLEEALKPLEEVLNLAQS |
| | | hIL2(R38A, | STFRSVSELPIMHQDWLKGKEFKCR | (SEQ ID | KNFHLRPRDLISNINVIVLELKGSE |
| | | F42A, Y45A, | VNSAAFGAPIEKTISKTKGRPKAPQ | NO: 23) | TTFMCEYADETATIVEFLNRWITFA |
| | | E62A) | VYTIPPPKEQMAKDKVSLTCMITDF | | QSIISTLT |
| | | | FPEDITVEWQWNGQPAENYDNTQPI | | (SEQ ID |
| | | | MDTDGSYFVYSDLNVQKSNWEAGNT | | NO: 3) |
| | | | FTCSVLHEGLHNHHTEKSLSHSPG | | |
| | | | (SEQ | | |
| | | | ID | | |
| | | | NO: 283) | | |
| AK464 | DNA534 | Hole: | VRSGCKPCICTVPEVSSVFIFPPKP | PGSGS | AVKNCSHLECFYNSRANVSCMWSHE |
| | | mFcIgG1 | KDVLTITLTPKVTCVVVAISKDDPE | (SEQ ID | EALNVTTCHVHAKSNLRHWNKTCEL |
| | | (DAPG)- | VQFSWFVDDVEVHTAQTQPREEQFN | NO: 14) | TLVRQASWACNLILGSFPESQSLTS |
| | | hCD122 | STFRSVSELPIMHQDWLKGKEFKCR | | VDLLDINVVCWEEKGWRRVKTCDFH |
| | | | VNSAAFGAPIEKTISKTKGRPKAPQ | | PFDNLRLVAPHSLQVLHIDTQRCNI |
| | | | VYTIPPPKKQMAKDKVSLTCMITDF | | SWKVSQVSHYIEPYLEFEARRRLLG |
| | | | FPEDITVEWQWNGQPAENYKNTQPI | | HSWEDASVLSLKQRQQWLFLEMLIP |
| | | | MKTDGSYFVYSKLNVQKSNWEAGNT | | STSYEVQVRVKAORNN |
| | | | FTCSVLHEGLHNHHTEKSLSHSPG | | TGTWSPWSQPLTFRTRPADPVIKF |
| | | | (SEQ | | (SEQ ID |
| | | | ID | | NO: 326) |
| | | | NO: 284) | | |
| AK465 | DNA531 | Knob: | VRSGCKPCICTVPEVSSVFIFPPKP | GSPG | VPLSY |
| | | mFcIgG1 | KDVLTITLTPKVTCVVVAISKDDPE | (SEQ ID | (SEQ ID |
| | | (DAPG)- | VQFSWFVDDVEVHTAQTQPREEQFN | NO: 34) | NO: 28) |
| | | [VPLSLY] | STFRSVSELPIMHQDWLKGKEFKCR | | |
| | | hIL2(R38A, | VNSAAFGAPIEKTISKTKGRPKAPQ | | |
| | | F42A, Y45A, | VYTIPPPKEQMAKDKVSLTCMITDF | | |
| | | E62A) | FPEDITVEWQWNGQPAENYDNTQPI | | |
| | | | MDTDGSYFVYSDLNVQKSNWEAGNT | | |
| | | | FTCSVLHEGLHNHHTEKSLSHSPG | | |
| | | | (SEQ | | |
| | | | ID | | |
| | | | NO: 283) | | |
| AK466 | DNA5332 | Hole: | VRSGCKPCICTVPEVSSVFIFPPKP | GSPG | |
| | | mFcIgG1 | KDVLTITLTPKVTCVVVAISKDDPE | (SEQ ID | |
| | | (DAPG) | VQFSWFVDDVEVHTAQTQPREEQFN | NO: 34) | |
| | | Knob: | STFRSVSELPIMHQDWLKGKEFKCR | | |
| | | mFcIgG1 | VNSAAFGAPIEKTISKTKGRPKAPQ | | |
| | | (DAPG)- | VYTIPPPKKQMAKDKVSLTCMITDF | | |
| | | | FPEDITVEWQWNGQPAENYKNTQPI | | |
| | | | MKTDGSYFVYSKLNVQKSNWEAGNT | | |
| | | | FTCSVLHEGLHNHHTEKSLSHSPG | | |
| | | | (SEQ | | |
| | | | ID | | |
| | | | NO: 284) | | |
| AK466 | DNA531 | [VPLSLY]- | VRSGCKPCICTVPEVSSVFIFPPKP | | VPLSY |
| | | hIL2(R38A, F42A, | KDVLTITLTPKVTCVVVAISKDDPE | | (SEQ ID |
| | | Y45A, | VQFSWFVDDVEVHTAQTQPREEQFN | | NO: 28) |
| | | E52A, | STFRSVSELPIMHQDWLKGKEFKCR | | |
| | | C125A) | VNSAAFGAPIEKTISKTKGRPKAPQ | | |
| | | | VYTIPPPKEQMAKDKVSLTCMITDF | | |
| | | | FPEDITVEWQWNGQPAENYDNTQPI | | |
| | | | MDTDGSYFVYSDLNVQKSNWEAGNT | | |
| | | | FTCSVLHEGLHNHHTEKSLSHSPG | | |
| | | | (SEQ | | |
| | | | ID | | |
| | | | NO: 283) | | |
| AK466 | DNA533 | Hole: mFcIgG1 | VRSGCKPCICTVPEVSSVFIFPPKP | PGSG | AVNGTSQFTCFYNSRANISCVWSQD |
| | | (DAPG)-hCD122 | KDVLTITLTPKVTCVVVAISKDDPE | S (SEQ ID | GALQDTSCQVHAWPDRRRWNQTCEL |
| | | | VQFSWFVDDVEVHTAQTQPREEQFN | NO: 14) | LFVSQASWACNLILGAPDSQKLTTV |
| | | | STFRSVSELPIMHQDWLKGKEFKCR | | DIVTLRVLCREGVRWRVMAIQDFKP |
| | | | VNSAAFGAPIEKTISKTKGRPKAPQ | | FENLRLMAPISLQVVHVETHRCNIS |
| | | | VYTIPPPKKQMAKDKVSLTCMITDF | | WEISQASHYFERHLEFEARTLSPGH |
| | | | FPEDITVEWQWNGQPAENYKNTQPI | | TWEEAPLLTLKQKQEWICLETLTPD |
| | | | MKTDGSYFVYSKLNVQKSNWEAGNT | | TQYEFQVRVKPLQGEFTTWSPWSQP |
| | | | FTCSVLHEGLHNHHTEKSLSHSPG | | LAFRTKPAALGKD |
| | | | (SEQ | | (SEQ ID NO: 4) |
| | | | ID | | |
| | | | NO: 284) | | |
| AK467 | DNA531 | Knob: mFcIgG1 | VRSGCKPCICTVPEVSSVFIFPPKP | GSPG | VPLSY |
| | | (DAPG)-[VPLSLY]- | KDVLTITLTPKVTCVVVAISKDDPE | (SEQ ID | (SEQ ID |
| | | hIL2(R38A, F42A, | VQFSWFVDDVEVHTAQTQPREEQFN | NO: 34) | NO: 28) |
| | | Y45A, ES2A, | STFRSVSELPIMHQDWLKGKEFKCR | | |
| | | C325A) | VNSAAFGAPIEKTISKTKGRPKAPQ | | |
| | | | VYTIPPPKEQMAKDKVSLTCMITDF | | |
| | | | FPEDITVEWQWNGQPAENYDNTQPI | | |
| | | | MDTDGSYFVYSDLNVQKSNWEAGNT | | |
| | | | FTCSVLHEGLHNHHTEKSLSHSPG | | |
| | | | (SEQ | | |
| | | | ID | | |
| | | | NO: 283) | | |
| AK467 | DNA534 | Hole: mFcIgG1 | VRSGCKPCICTVPEVSSVFIFPPKP | PGSGS | AVKNCSHLECFYNSRANVSCMWSHE |
| | | (DAPG)-hCD122 | KDVLTITLTPKVTCVVVAISKDDPE | (SEQ ID | EALNVTTCHVHAKSNLRHWNKTCEL |
| | | | VQFSWFVDDVEVHTAQTQPREEQFN | NO: 14) | TLVRQASWACNLILGSFPESQSLTS |
| | | | STFRSVSELPIMHQDWLKGKEFKCR | | VDLLDINVVCWEEKGWRRVKTCDFH |
| | | | VNSAAFGAPIEKTISKTKGRPKAPQ | | PFDNLRLVAPHSLQVLHIDTQRCNI |
| | | | VYTIPPPKKQMAKDKVSLTCMITDF | | SWKVSQVSHYIEPYLEFEARRRLLG |
| | | | FPEDITVEWQWNGQPAENYKNTQPI | | HSWEDASVLSLKQRQQWLFLEMLIP |
| | | | MKTDGSYFVYSKLNVQKSNWEAGNT | | STSYEVQVRVKAORNN |
| | | | FTCSVLHEGLHNHHTEKSLSHSPG | | TGTWSPWSQPLTFRTRPADPVIKF |
| | | | (SEQ | | (SEQ ID |
| | | | ID | | NO: 326) |
| | | | NO: 284) | | |
| AKA68 | DNA576 | Hole: hFc(N237A, | DKTHTCPPCPAPELLGGPSVFLFPP | PGSGS | AVNGTSQFTCFYNSRANISCVWSQD |
| | | M2S2Y, S254T, | KPKDTLYITREPEVTCVVVDVSHED | (SEQ ID | GALQDTSCQVHAWPDRRRWNQTCEL |
| | | T256E)-hCD122 | PEVKFNWYVDGVEVHNAKTKPREEQ | NO: 14) | LFVSQASWACNLILGAPDSQKLTTV |
| | | | YASTYRVVSVLTVLHQDWLNGKEYK | | DIVTLRVLCREGVRWRVMAIQDFKP |
| | | | CKVSNKALPAPIEKTISKAKGQPRE | | FENLRLMAPISLQVVHVETHRCNIS |
| | | | PQVCTLPPSRDELTKNQVSLSCAVK | | WEISQASHYFERHLEFEARTLSPGH |
| | | | GFYPSDIAVEWESNGQPENNYKTTP | | TWEEAPLLTLKQKQEWICLETLTPD |
| | | | PVLDSDG | | TQYEFQVRVKPLQGEFTTWSPWSQP |
| | | | SPFLVSKLTVDKSRWQGQMVFSCSV | | LAFRTKPAALGKD |
| | | | MHEALHNHYTQKSLSLSPG | | (SEQ ID |
| | | | (SEQ | | NO: 4) |
| | | | ID | | |
| | | | NO: 292) | | |
| AK468 | DNA580 | Knob: hFc(M297A, | DKTHTCPPCPAPELLGGPSVFLFPP | GSPG | VPLSY |
| | | M252Y, S254T, | KPKDTLYITREPEVTCVVVDVSHED | (SEQ ID | (SEQ ID |
| | | T2S6E)-[VPLSLY]- | PEVKFNWYVDGVEVHNAKTKPREEQ | NO: 34) | NO: 28) |
| | | hIL2, R38A, F42A, | YASTYRVVSVLTVLHQDWLNGKEYK | | |
| | | Y45A, E52A, | CKVSNKALPAPIEKTISKAKGQPRE | | |
| | | C125A) | PQVYTLPPCRDELTKNQVSLWCLVK | | |
| | | | GFYPSDIAVEWESNGQPENNYKTTP | | |
| | | | PVLDSDGSFFLYSKLTVDKSRWQQG | | |
| | | | NVPSCSVMHEALHNHYTQKSLSLSP | | |
| | | | G | | |
| | | | (SEQ | | |
| | | | ID | | |
| | | | NO: 294) | | |
| AK469 | DNA575 | Hole: | DKTHTCPPCPAPELLGGPSVFLFPP | PGSGS (SEQ ID | AVNGTSQFTCFYNSRANISCVWSQD |
| | | hFc(N297A, | KPKDTLMASRTPEVTCVVVDVSHED | NO: 14) | GALQDTSCQVHAWPDRRRWNQTCEL |
| | | I253A)- | PEVKFNWYVDGVEVHNAKTKPREEQ | | LFVSQASWACNLILGAPDSQKLTTV |
| | | hCD122 | YASTYRVVSVLTVLHQDWLNGKEYK | | DIVTLRVLCREGVRWRVMAIQDFKP |
| | | | CKVSNKALPAPIEKTISKAKGQPRE | | FENLRLMAPISLQVVHVETHRCNIS |
| | | | PQVCTLPPSRDELTKNQVSLSCAVK | | WEISQASHYFERHLEFEARTLSPGH |
| | | | GFYPSDIAVEWESNGQPENNYKTTP | | TWEEAPLLTLKQKQEWICLETLTPD |
| | | | PVLDSDGSFFLVSKLTVDKSRWQQG | | TQYEFQVRVKPLQGEFTTWSPWSQP |
| | | | NVFSCSVMHEALHNHYTQKSLSLSP | | LAFRTKPAALGKD |
| | | | G | | (SEQ ID NO: 4) |
| | | | (SEQ | | |
| | | | ID | | |
| | | | NO: 10) | | |
| AK469 | DNA577 | Knob: | DKTHTCPPCPAPELLGGPSVFLFPP | GSSPPG | APTSSSTKKTQLQLEHLLLDLQMIL |
| | | hFc(N297, | KPKDTLMASRTPEVTCVVVDVSHED | GGSSGG | NGINNYKNPKLTAMLTAKFAMPKKA |
| | | I253A)- | PEVKFNWYVDGVEVHNAKTKPREEQ | GSGP | TELKHLQCLEEALKPLEEVLNLAQS |
| | | hIL2 | YASTYRVVSVLTVLHQDWLNGKEYK | (SEQ ID | KNFHLRPRDLISNINVIVLELKGSE |
| | | (R38A, F42A, | CKVSNKALPAPIEKTISKAKGQFRE | NO: 23) | TTFMCEYADETATIVEFLNRWITFA |
| | | Y45A, E52A, | PQVYTLPPCRDELTKNQVSLWCLVK | | QSIISTLT |
| | | C125A) | GFYPSDIAVEWESNGQPENNYKTTP | | (SEQ ID |
| | | | PVLDSDGSFFLYSKLTVDKSRWQQG | | NO: 3) |
| | | | NVFSCSVMHEALHNHYTQKSLSLSP | | |
| | | | G | | |
| | | | (SEQ | | |
| | | | ID | | |
| | | | NO: 13) | | |
| AK470 | DNA576 | Hole: | DKTHTCPPCPAPELLGGPSVFLFPP | PGSGS | AVNGTSQFTCFYNSRANISCVWSQD |
| | | hFc(N297A, | KPKDTLYITREPEVTCVVVDVSHED | (SEQ ID | GALQDTSCQVHAWPDRRRWNQTCEL |
| | | M252Y, | PEVKFNWYVDGVEVHNAKTKPREEQ | NO: 14) | LFVSQASWACNLILGAPDSQKLTTV |
| | | S254T, | YASTYRVVSVLTVLHQDWLNGKEYK | | DIVTLRVLCREGVRWRVMAIQDFKP |
| | | T256E)- | CKVSNKALPAPIEKTISKAKGQPRE | | FENLRLMAPISLQVVHVETHRCNIS |
| | | hCD122 | PQVCTLPPSRDELTKNQVSLSCAVK | | WEISQASHYFERHLEFEARTLSPGH |
| | | | GFYPSDIAVEWESNGQPENNYKTTP | | TWEEAPLLTLKQKQEWICLETLTPD |
| | | | PVLDSDG | | TQYEFQVRVKPLQGEFTTWSPWSQP |
| | | | SPFLVSKLTVDKSRWQGQMVFSCSV | | LAFRTKPAALGKD |
| | | | MHEALHNHYTQKSLSLSPG | | (SEQ ID |
| | | | (SEQ | | NO: 4) |
| | | | ID | | |
| | | | NO: 292) | | |
| AK470 | DNA578 | Knob: | DKTHTCPPCPAPELLGGPSVFLFPP | GSSPPGGGSSGG | APTSSSTKKTQLQLEHLLLDLQMIL |
| | | hFc(N297A, | KPKDTLYITREPEVTCVVVDVSHED | GSGP | NGINNYKNPKLTAMLTAKFAMPKKA |
| | | M252Y, | PEVKFNWYVDGVEVHNAKTKPREEQ | (SEQ ID | TELKHLQCLEEALKPLEEVLNLAQS |
| | | 52547, | YASTYRVVSVLTVLHQDWLNGKEYK | NO: 23) | KNFHLRPRDLISNINVIVLELKGSE |
| | | T256E)- | CKVSNKALPAPIEKTISKAKGQPRE | | TTFMCEYADETATIVEFLNRWITFA |
| | | hIL2(R38A, | PQVYTLPPCRDELTKNQVSLWCLVK | | QSIISTLT |
| | | F42A, | GFYPSDIAVEWESNGQPENNYKTTP | | (SEQ ID |
| | | Y45A, E62A, | PVLDSDGSFFLYSKLTVDKSRWQQG | | NO: 3) |
| | | C125A) | NVPSCSVMHEALHNHYTQKSLSLSP | | |
| | | | G | | |
| | | | (SEQ | | |
| | | | ID | | |
| | | | NO: 294) | | |
| AK471 | DNA575 | Hole: | DKTHTCPPCPAPELLGGPSVFLFPP | PGSGS | AVNGTSQFTCFYNSRANISCVWSQD |
| | | hFc(N297A, | KPKDTLMASRTPEVTCVVVDVSHED | (SEQ ID | GALQDTSCQVHAWPDRRRWNQTCEL |
| | | I253A)- | PEVKFNWYVDGVEVHNAKTKPREEQ | NO: 14) | LFVSQASWACNLILGAPDSQKLTTV |
| | | HCD122 | YASTYRVVSVLTVLHQDWLNGKEYK | | DIVTLRVLCREGVRWRVMAIQDFKP |
| | | | CKVSNKALPAPIEKTISKAKGQPRE | | FENLRLMAPISLQVVHVETHRCNIS |
| | | | PQVCTLPPSRDELTKNQVSLSCAVK | | WEISQASHYFERHLEFEARTLSPGH |
| | | | GFYPSDIAVEWESNGQPENNYKTTP | | TWEEAPLLTLKQKQEWICLETLTPD |
| | | | PVLDSDGSFFLVSKLTVDKSRWQQG | | TQYEFQVRVKPLQGEFTTWSPWSQP |
| | | | NVFSCSVMHEALHNHYTQKSLSLSP | | LAFRTKPAALGKD |
| | | | G | | (SEQ ID NO: 4) |
| | | | (SEQ | | |
| | | | ID | | |
| | | | NO: 10) | | |
| AK471 | DNA579 | Knob: | DKTHTCPPCPAPELLGGPSVFLFPP | GSPG | VPLSLY |
| | | hFc(M297, | KPKDTLMASRTPEVTCVVVDVSHED | (SEQ ID | (SEQ ID |
| | | I253A)- | PEVKFNWYVDGVEVHNAKTKPREEQ | NO: 34) | NO: 28) |
| | | [VPLSLY]- | YASTYRVVSVLTVLHQDWLNGKEYK | | |
| | | hIL2(R38A, | CKVSNKALPAPIEKTISKAKGQFRE | | |
| | | F42A, Y45A, | PQVYTLPPCRDELTKNQVSLWCLVK | | |
| | | E62A, | GFYPSDIAVEWESNGQPENNYKTTP | | |
| | | C125A) | PVLDSDGSFFLYSKLTVDKSRWQQG | | |
| | | | NVFSCSVMHEALHNHYTQKSLSLSP | | |
| | | | G | | |
| | | | (SEQ | | |
| | | | ID | | |
| | | | NO: 13) | | |
| AK439 | DNA158 | Hole: | DKTHTCPPCPAPELLGGPSVFLFPP | | |
| | | hFc(N297A) | KPKDTLMISRTPEVTCVVVDVSHED | | |
| | | | PEVKFNWYVDGVEVHNAKTKPREEQ | | |
| | | | YASTYRVVSVLTVLHQDWLNGKEYK | | |
| | | | CKVSNKALPAPIEKTISKAKGQPRE | | |
| | | | PQVCTLPPSRDELTKNQVSLSCAVK | | |
| | | | GFYPSDIAVEWESNGQPENNYKTTP | | |
| | | | PVLDSDGSFFLVSKLTVDKSRWQQG | | |
| | | | MVFSCSVMHEALHNHYTQKSLSLSP | | |
| | | | G | | |
| | | | (SEQ | | |
| | | | ID | | |
| | | | NO: 9) | | |
| AK439 | DNA544 | Knob: | DKTHTCPPCPAPELLGGPSVFLFPP | GSPG | VPLSLY |
| | | hFc(N297A)- | KPKDTLMISRTPEVTCVVVDVSHED | (SEQ ID | (SEQ ID |
| | | [VPLSLY]- | PEVKFNWYVDGVEVHNAKTKPREEQ | NO: 34) | NO: 28) |
| | | hIL2 | YASTYRVVSVLTVLHQDWLNGKEYK | | |
| | | (R38A, F42A, | CKVSNKALPAPIEKTISKAKGQPRE | | |
| | | Y45A, E62A, | PQVYTLPPCRDELTKNQVSLWCLVK | | |
| | | L80F, RS3D, | GFYPSDIAVEWESNGQPENNYKTTP | | |
| | | L85V, 186V, | PVLDSDGSFFLYSKLTVDKSRWQQG | | |
| | | I92F, C125A) | NVFSCSVMHEALHNHYTQKSLSLSP | | |
| | | | G | | |
| | | | (SEQ | | |
| | | | ID | | |
| | | | NO: 12) | | |
| AK440 | DNA187 | Hole: | DKTHTCPPCPAPELLGGPSVFLFPP | PGSGS | AVNGTSQFTCFYNSRANISCVWSQD |
| | | hFc(N297A)- | KPKDTLMISRTPEVTCVVVDVSHED | (SEQ ID | GALQDTSCQVHAWPDRRRWNQTCEL |
| | | hCD122 | PEVKFNWYVDGVEVHNAKTKPREEQ | NO: 14) | LFVSQASWACNLILGAPDSQKLTTV |
| | | | YASTYRVVSVLTVLHQDWLNGKEYK | | DIVTLRVLCREGVRWRVMAIQDFKP |
| | | | CKVSNKALPAPIEKTISKAKGQPRE | | FENLRLMAPISLQVVHVETHRCNIS |
| | | | PQVCTLPPSRDELTKNQVSLSCAVK | | WEISQASHYFERHLEFEARTLSPGH |
| | | | GFYPSDIAVEWESNGQPENNYKTTP | | TWEEAPLLTLKQKQEWICLETLTPD |
| | | | PVLDSDGSFFLVSKLTVDKSRWQQG | | TQYEFQVRVKPLQGEFTTWSPWSQP |
| | | | MVFSCSVMHEALHNHYTQKSLSLSP | | LAFRTKPAALGKD |
| | | | G | | (SEQ ID NO: 4) |
| | | | (SEQ | | |
| | | | ID | | |
| | | | NO: 9) | | |
| AK440 | DNA544 | Knob: | DKTHTCPPCPAPELLGGPSVFLFPP | GSPG | VPLSLY |
| | | hFc(N297A)- | KPKDTLMISRTPEVTCVVVDVSHED | (SEQ ID | (SEQ ID |
| | | [VPLSLY]- | PEVKFNWYVDGVEVHNAKTKPREEQ | NO: 34) | NO: 28) |
| | | hIL2 | YASTYRVVSVLTVLHQDWLNGKEYK | | |
| | | (R38A, F42A, | CKVSNKALPAPIEKTISKAKGQPRE | | |
| | | Y45A, E62A, | PQVYTLPPCRDELTKNQVSLWCLVK | | |
| | | L80F, RS3D, | GFYPSDIAVEWESNGQPENNYKTTP | | |
| | | L85V, 186V, | PVLDSDGSFFLYSKLTVDKSRWQQG | | |
| | | I92F, C125A) | NVFSCSVMHEALHNHYTQKSLSLSP | | |
| | | | G | | |
| | | | (SEQ | | |
| | | | ID | | |
| | | | NO: 12) | | |
| AK441 | DNA543 | Hole: | DKTHTCPPCPAPELLGGPSVFLFPP | GPPSGSSPG | VPLSLY |
| | | hFc(N297A)- | KPKDTLMISRTPEVTCVVVDVSHED | (SEQ ID | (SEQ ID |
| | | [VPLSLY]- | PEVKFNWYVDGVEVHNAKTKPREEQ | NO: 36) | NO: 28) |
| | | hCD122 | YASTYRVVSVLTVLHQDWLNGKEYK | | |
| | | | CKVSNKALPAPIEKTISKAKGQPRE | | |
| | | | PQVCTLPPSRDELTKNQVSLSCAVK | | |
| | | | GFYPSDIAVEWESNGQPENNYKTTP | | |
| | | | PVLDSDGSFFLVSKLTVDKSRWQQG | | |
| | | | MVFSCSVMHEALHNHYTQKSLSLSP | | |
| | | | G | | |
| | | | (SEQ | | |
| | | | ID | | |
| | | | NO: 9) | | |
| AK441 | DNA546 | Knob: | DKTHTCPPCPAPELLGGPSVFLFPP | GGSSPPGGGSSGG | APTSSSTKKTQLQLEHLLLDLQMIL |
| | | hFc(N297A)- | KPKDTLMISRTPEVTCVVVDVSHED | GSGP (SEQ ID | NGINNYKNPKLTAMLTAKFAMPKKA |
| | | hIL2 | PEVKFNWYVDGVEVHNAKTKPREEQ | NO: 23) | TELKHLQCLEEALKPLEEVLNLAQS |
| | | (R38A, F42A, | YASTYRVVSVLTVLHQDWLNGKEYK | | KNFHFDPRDWSNINVFVLELKGSET |
| | | Y45A, E62A, | CKVSNKALPAPIEKTISKAKGQPRE | | TFMCEYADETATI |
| | | L80F, RS3D, | PQVYTLPPCRDELTKNQVSLWCLVK | | VEFLNRWITFAQSIISTLT |
| | | L85V, 186V, | GFYPSDIAVEWESNGQPENNYKTTP | | (SEQ ID |
| | | I92F, C125A) | PVLDSDGSFFLYSKLTVDKSRWQQG | | NO: 328) |
| | | | NVFSCSVMHEALHNHYTQKSLSLSP | | |
| | | | G | | |
| | | | (SEQ | | |
| | | | ID | | |
| | | | NO: 12) | | |
| AK442 | DNA255 | Knob: | DKTHTCPPCPAPELLGGPSVFLFPP | GGSSPPGGGSSGG | APTSSSTKKTQLQLEHLLLDLQMIL |
| | | hFc(N297A)- | KPKDTLMISRTPEVTCVVVDVSHED | GSGP (SEQ ID | NGINNYKNPKLTAMLTAKFAMPKKA |
| | | hIL2(R38A, | PEVKFNWYVDGVEVHNAKTKPREEQ | NO: 23) | TELKHLQCLEEALKPLEEVLNLAQS |
| | | F42A, Y45A, | YASTYRVVSVLTVLHQDWLNGKEYK | | KNFHLRPRDLISNINVIVLELKGSE |
| | | E62A, C125A) | CKVSNKALPAPIEKTISKAKGQPRE | | TTFMCEYADETATIVEFLNRWITFA |
| | | | PQVYTLPPCRDELTKNQVSLWCLVK | | QSIISTLT |
| | | | GFYPSDIAVEWESNGQPENNYKTTP | | (SEQ ID |
| | | | PVLDSDGSFFLYSKLTVDKSRWQQG | | NO: 3) |
| | | | NVFSCSVMHEALHNHYTQKSLSLSP | | |
| | | | G | | |
| | | | (SEQ | | |
| | | | ID | | |
| | | | NO: 12) | | |
| AK442 | DNA553 | Hole: | DKTHTCPPCPAPELLGGPSVFLFPP | GPPSGSSPG | DSGGFMLT |
| | | hFc(N297A)- | KPKDTLMISRTPEVTCVVVDVSHED | (SEQ ID | (SEQ ID |
| | | [DSGGFMLT]- | PEVKFNWYVDGVEVHNAKTKPREEQ | NO: 36) | NO: 25) |
| | | hCD122 | YASTYRVVSVLTVLHQDWLNGKEYK | | |
| | | | CKVSNKALPAPIEKTISKAKGQPRE | | |
| | | | PQVCTLPPSRDELTKNQVSLSCAVK | | |
| | | | GFYPSDIAVEWESNGQPENNYKTTP | | |
| | | | PVLDSDGSFFLVSKLTVDKSRWQQG | | |
| | | | MVFSCSVMHEALHNHYTQKSLSLSP | | |
| | | | G | | |
| | | | (SEQ | | |
| | | | ID | | |
| | | | NO: 9) | | |
| AK443 | DNA187 | Hole: | DKTHTCPPCPAPELLGGPSVFLFPP | PGSGS | AVNGTSQFTCFYNSRANISCVWSQD |
| | | hFc(N297A)- | KPKDTLMISRTPEVTCVVVDVSHED | (SEQ ID | GALQDTSCQVHAWPDRRRWNQTCEL |
| | | hCD122 | PEVKFNWYVDGVEVHNAKTKPREEQ | NO: 14) | LFVSQASWACNLILGAPDSQKLTTV |
| | | | YASTYRVVSVLTVLHQDWLNGKEYK | | DIVTLRVLCREGVRWRVMAIQDFKP |
| | | | CKVSNKALPAPIEKTISKAKGQPRE | | FENLRLMAPISLQVVHVETHRCNIS |
| | | | PQVCTLPPSRDELTKNQVSLSCAVK | | WEISQASHYFERHLEFEARTLSPGH |
| | | | GFYPSDIAVEWESNGQPENNYKTTP | | TWEEAPLLTLKQKQEWICLETLTPD |
| | | | PVLDSDGSFFLVSKLTVDKSRWQQG | | TQYEFQVRVKPLQGEFTTWSPWSQP |
| | | | MVFSCSVMHEALHNHYTQKSLSLSP | | LAFRTKPAALGKD |
| | | | G | | (SEQ ID NO: 4) |
| | | | (SEQ | | |
| | | | ID | | |
| | | | NO: 9) | | |
| AK443 | DNA554 | Knob: | DKTHTCPPCPAPELLGGPSVFLFPP | GSPG | VPLSLY |
| | | hFc(N297A)- | KPKDTLMISRTPEVTCVVVDVSHED | (SEQ ID | (SEQ ID |
| | | [VPLSLY]- | PEVKFNWYVDGVEVHNAKTKPREEQ | NO: 34) | NO: 28) |
| | | hIL2(E15R, | YASTYRVVSVLTVLHQDWLNGKEYK | | |
| | | L18C, D20R, | CKVSNKALPAPIEKTISKAKGQPRE | | |
| | | R38A, | PQVYTLPPCRDELTKNQVSLWCLVK | | |
| | | F42A, Y45A, | GFYPSDIAVEWESNGQPENNYKTTP | | |
| | | E62A) | PVLDSDGSFFLYSKLTVDKSRWQQG | | |
| | | | NVFSCSVMHEALHNHYTQKSLSLSP | | |
| | | | G | | |
| | | | (SEQ | | |
| | | | ID | | |
| | | | NO: 12) | | |
| AK444 | DNA281 | Knob: | DKTHTCPPCPAPELLGGPSVFLFPP | GSGP | DSGGFMLT |
| | | hFc(N297A)- | KPKDTLMISRTPEVTCVVVDVSHED | (SEQ ID | (SEQ ID |
| | | [VPLSLY]- | PEVKFNWYVDGVEVHNAKTKPREEQ | NO: 33) | NO: 25) |
| | | hIL2(R38A, | YASTYRVVSVLTVLHQDWLNGKEYK | | |
| | | F42A, Y45A, | CKVSNKALPAPIEKTISKAKGQPRE | | |
| | | E62A, C125A) | PQVYTLPPCRDELTKNQVSLWCLVK | | |
| | | | GFYPSDIAVEWESNGQPENNYKTTP | | |
| | | | PVLDSDGSFFLYSKLTVDKSRWQQG | | |
| | | | NVFSCSVMHEALHNHYTQKSLSLSP | | |
| | | | G | | |
| | | | (SEQ | | |
| | | | ID | | |
| | | | NO: 12) | | |
| AK444 | DNA440 | Hole: | DKTHTCPPCPAPELLGGPSVFLFPP | PGSGS (SEQ ID | AVNGTSQFTCFYNSRANISCVWSQD |
| | | hFc(N297A)- | KPKDTLMISRTPEVTCVVVDVSHED | NO: 14) | GALQDTSCQVHAWPDRRRWNQTCEL |
| | | hCD122 | PEVKFNWYVDGVEVHNAKTKPREEQ | | LPVSQASWACNLILGAPDSQKLTTV |
| | | (C122S, C168S) | YASTYRVVSVLTVLHQDWLNGKEYK | | DIVTLRVLCREGVRWRVMAIQPFKP |
| | | | CKVSNKALPAPIEKTISKAKGQPRE | | FENLRLMAPISLQVVHVETHRSNIS |
| | | | PQVCTLPPSRDELTKNQVSLSCAVK | | WEISQASHYFERHLEFEARTLSPGH |
| | | | GFYPSDIAVEWESNGQPENNYKTTP | | TWEEAPLLTLKQKQEWISLETLTPD |
| | | | PVLDSDGSFFLVSKLTVDKSRWQQG | | TQYEFQVRVKPLQGEFTTWSPWSQP |
| | | | MVFSCSVMHEALHNHYTQKSLSLSP | | LAFRTKPAALGKD |
| | | | G | | (SEQ ID |
| | | | (SEQ | | NO: 5) |
| | | | ID | | |
| | | | NO: 9) | | |
| AK449 | DNA547 | Hole: | EPKSSDKTHTCPPCPAPELLGGPSV | PGSGS | AVNGTSQFTCFYNSRANISCVWSQD |
| | | hFcIgG1 | FLFPPKPKDTLMISRTPEVTCVVVD | (SEQ ID | GALQDTSCQVHAWPDRRRWNQTCEL |
| | | (N297A + EPKSS)- | VSHEDPEVKFNWYVDGVEVHNAKTK | NO: 14) | LFVSQASWACNLILGAPDSQKLTTV |
| | | Hole: | PREEQYASTYRVVSVLTVLHQDWLN | | DIVTLRVLCREGVRWRVMAIQDFKP |
| | | hFc(N297A)- | GKEYKCKVSNKALPAPIEKTISKAK | | FENLRLMAPISLQVVHVETHRCNIS |
| | | hCD122 | GQPREPQVCTLPPSRDELTKNQVSL | | WEISQASHYFERHLEFEARTLSPGH |
| | | | SCAVKGFYPSDIAVEWESNGQPENN | | TWEEAPLLTLKQKQEWICLETLTPD |
| | | | YKTTPPVLDSDGSFFLVSKLTVDKS | | TQYEFQVRVKPLQGEFTTWSPWSQP |
| | | | RWQQGNVFSCSVMHEALHNHYTQKS | | LAFRTKPAALGKD |
| | | | LSLSPG | | (SEQ ID NO: 4) |
| | | | (SEQ | | |
| | | | ID | | |
| | | | NO: 285) | | |
| AK449 | DNA550 | Knob: | EPKSSDKTHTCPPCPAPELLGGPSV | GSPG | VPLSLY |
| | | hFcIgG1 | FLFPPKPKDTLMISRTPEVTCVVVD | (SEQ ID | (SEQ ID |
| | | (N297A + EPKSS)- | VSHEDPEVKFNWYVDGVEVHNAKTK | NO: 34) | NO: 28) |
| | | hIL2(R38A, | PREEQYASTYRVVSVLTVLHQDWLN | | |
| | | F42A, Y45A, | GKEYKCKVSNKALPAPIEKTISKAK | | |
| | | E62A, C125A) | GQPREPQVYTLPPCRDELTKNQVSL | | |
| | | | WCLVKGFYPSDIAVEWESNGQPENN | | |
| | | | NYKTTPPVLDSDGSFFLYSKLTVDK | | |
| | | | SRWQQGNVFSCSVMHEALHNHYTQK | | |
| | | | SLSLSPG | | |
| | | | (SEQ | | |
| | | | ID | | |
| | | | NO: 288) | | |
| AK450 | DNA548 | Hole: | AKTDKTHTCPPCPAPELLGGPSVFL | PGSGS | AVNGTSQFTCFYNSRANISCVWSQD |
| | | hFcIgG1 | FPPKPKDTLMISRTPEVTCVVVDVS | (SEQ ID | GALQDTSCQVHAWPDRRRWNQTCEL |
| | | (N297A + AKT)- | HEDPEVKFNWYVDGVEVHNAKTKPR | NO: 14) | LFVSQASWACNLILGAPDSQKLTTV |
| | | Hole: | EEQYASTYRVVSVLTVLHQPWLNGK | | DIVTLRVLCREGVRWRVMAIQDFKP |
| | | hFc(N297A)- | EYKCKVSNKALPAPIEKTISKAKGQ | | FENLRLMAPISLQVVHVETHRCNIS |
| | | hCD122 | PREPQVCTLPPSRDELTKP | | WEISQASHYFERHLEFEARTLSPGH |
| | | | NQVSLSCAVKGFYPSDIAVEWESNG | | TWEEAPLLTLKQKQEWICLETLTPD |
| | | | QPENNYKTTPPVLDSDGSFFLYSKL | | TQYEFQVRVKPLQGEFTTWSPWSQP |
| | | | TVDKSRWQQGNVFSCSVMHEALHNH | | LAFRTKPAALGKD |
| | | | YTQKSLSLSPG | | (SEQ ID NO: 4) |
| | | | (SEQ | | |
| | | | ID | | |
| | | | NO: 286) | | |
| AK450 | DNA551 | Knob: | AKTDKTHTCPPCPAPELLGGPSVFL | GSPG | VPLSLY |
| | | hFcIgG1 | FPPKPKDTLMISRTPEVTCVVVDVS | (SEQ ID | (SEQ ID |
| | | (N297A + AKT)- | HEDPEVKFNWYVDGVEVHNAKTKPR | NO: 34) | NO: 28) |
| | | [VPLSLY]- | EEQYASTYRVVSVLTVLHQDWLNGK | | |
| | | hIL2(R38A, | EYKCKVSNKALPAPIEKTISKAKGQ | | |
| | | F42A, Y45A, | PREPQVYTLPPCRDELTKNQVSLWC | | |
| | | E62A, C125A) | LVKGFYPSDIAVEWESNGQPENNYK | | |
| | | | TTPPVLDSDGSFFLYSKLTVDKSRW | | |
| | | | QQGNVFSCSVMHEALHNHYTQKSLS | | |
| | | | LSPG | | |
| | | | (SEQ | | |
| | | | ID | | |
| | | | NO: 289) | | |
| AK451 | DNA549 | Hole: | AKTEPKSSDKTHTCPPCPAPELLGG | PGSGS | AVNGTSQFTCFYNSRANISCVWSQD |
| | | hFcIgG1 | PSVFLFPPKPKDVLMISRTPEVTCV | (SEQ ID | GALQDTSCQVHAWPDRRRWNQTCEL |
| | | (N297A | VVDVSHEDPEVKFNWYVDGVEVHNA | NO: 14) | LFVSQASWACNLILGAPDSQKLTTV |
| | | AKTEPKSS)- | CTKPREEQYASTYRVVSVLTVLHQD | | DIVTLRVLCREGVRWRVMAIQDFKP |
| | | hCD122 | WLNGKEYKCKVSNKALPAPIEICTI | | FENLRLMAPISLQVVHVETHRCNIS |
| | | | SKAKGQPREPQVCTLPPSRDELTKN | | WEISQASHYFERHLEFEARTLSPGH |
| | | | QVSLSCAVKGFYPSDIAVEWESNGQ | | TWEEAPLLTLKQKQEWICLETLTPD |
| | | | PENNYKTTPPVLDSDG | | TQYEFQVRVKPLQGEFTTWSPWSQP |
| | | | SFFLVSKLTVDKSRWQQGNVFSCSV | | LAFRTKPAALGKD |
| | | | MHEALHNHYTQKSLSLSPG | | (SEQ ID NO: 4) |
| | | | (SEQ | | |
| | | | ID | | |
| | | | NO: 287) | | |
| AK451 | DNA552 | Knob: | AKTFPKSSDKTFITCPPCPAPELLG | GSPG | VPLSLY |
| | | hFcIgG1 | GPSVFLFPPKPKDTLMISRTPEVTC | (SEQ ID NO: 34) | (SEQ ID |
| | | (N297A | VVVDVSHEDPEVKFNWYVDGVEVHN | | NO: 28) |
| | | AKTAKTE | AKTKPREEQYASTYRVVSVLTVLHQ | | |
| | | PKSS)- | DWLNGKEYKCKVSNKALPAPiEKTI | | |
| | | [VPLSLY]- | SKAKGQPREPQVYTLPPCRDELTKN | | |
| | | hIL2(R38A, | QVSLWCLVKGFYPSDIAVEWESNGQ | | |
| | | F42A, Y45A, | PENNYKTTPPVLDSDGSFFLYSKLT | | |
| | | E62A, C125A) | VDKSRWQQGNVFSCSVMHEALHNHY | | |
| | | | TQKSLSLSPG | | |
| | | | (SEQ | | |
| | | | ID | | |
| | | | NO: 290) | | |
| AK452 | DNA187 | Hole: | DKTHTCPPCPAPELLGGPSVFLFPP | PGSGS (SEQ ID | AVNGTSQFTCFYNSRANISCVWSQD |
| | | hFc(N297A)- | KPKDTLMISRTPEVTCVVVDVSHED | NO: 14) | GALQDTSCQVHAWPDRRRWNQTCEL |
| | | hCD122 | PEVKFNWYVDGVEVHNAKTKPREEQ | | LFVSQASWACNLILGAPDSQKLTTV |
| | | | YASTYRVVSVLTVLHQDWLNGKEYK | | DIVTLRVLCREGVRWRVMAIQDFKP |
| | | | CKVSNKALPAPIEKTISKAKGQPRE | | FENLRLMAPISLQVVHVETHRCNIS |
| | | | PQVCTLPPSRDELTKNQVSLSCAVK | | WEISQASHYFERHLEFEARTLSPGH |
| | | | GFYPSDIAVEWESNGQPENNYKTTP | | TWEEAPLLTLKQKQEWICLETLTPD |
| | | | PVLDSDGSFFLVSKLTVDKSRWQQG | | TQYEFQVRVKPLQGEFTTWSPWSQP |
| | | | MVFSCSVMHEALHNHYTQKSLSLSP | | LAFRTKPAALGKD |
| | | | G | | (SEQ ID NO: 4) |
| | | | (SEQ | | |
| | | | ID | | |
| | | | NO: 9) | | |
| AK452 | DNA563 | Knob: | DKTHTCPPCPAPELLGGPSVFLFPP | GSPG | VPLSLY |
| | | hFc(N297A) | KPKDTLMISRTPEVTCVVVDVSHED | (SEQ ID | (SEQ ID |
| | | -[VPLSLY]- | PEVKFNWYVDGVEVHNAKTKPREEQ | NO: 34) | NO: 28) |
| | | hIL2(E15R, | YASTYRVVSVLTVLHQDWLNGKEYK | | |
| | | L18C, D20R, | CKVSNKALPAPIEKTISKAKGQPRE | | |
| | | R38A, | PQVYTLPPCRDELTKNQVSLWCLVK | | |
| | | F42A, Y45A, | GFYPSDIAVEWESNGQPENNYKTTP | | |
| | | E62A) | PVLDSDGSFFLYSKLTVDKSRWQQG | | |
| | | | NVFSCSVMHEALHNHYTQKSLSLSP | | |
| | | | G | | |
| | | | (SEQ | | |
| | | | ID | | |
| | | | NO: 12) | | |
| AK453 | DNA187 | Hole: | DKTHTCPPCPAPELLGGPSVFLFPP | PGSGS | AVNGTSQFTCFYNSRANISCVWSQD |
| | | hFc(N297A)- | KPKDTLMISRTPEVTCVVVDVSHED | (SEQ ID | GALQDTSCQVHAWPDRRRWNQTCEL |
| | | hCD122 | PEVKFNWYVDGVEVHNAKTKPREEQ | NO: 14) | LFVSQASWACNLILGAPDSQKLTTV |
| | | | YASTYRVVSVLTVLHQDWLNGKEYK | | DIVTLRVLCREGVRWRVMAIQDFKP |
| | | | CKVSNKALPAPIEKTISKAKGQPRE | | FENLRLMAPISLQVVHVETHRCNIS |
| | | | PQVCTLPPSRDELTKNQVSLSCAVK | | WEISQASHYFERHLEFEARTLSPGH |
| | | | GFYPSDIAVEWESNGQPENNYKTTP | | TWEEAPLLTLKQKQEWICLETLTPD |
| | | | PVLDSDGSFFLVSKLTVDKSRWQQG | | TQYEFQVRVKPLQGEFTTWSPWSQP |
| | | | MVFSCSVMHEALHNHYTQKSLSLSP | | LAFRTKPAALGKD |
| | | | G | | (SEQ ID |
| | | | (SEQ | | NO: 4) |
| | | | ID | | |
| | | | NO: 9) | | |
| AK453 | DNA565 | Knob: | DKTHTCPPCPAPELLGGPSVFLFPP | GSPG | VPLSLY |
| | | hFc(N297A)- | KPKDTLMISRTPEVTCVVVDVSHED | (SEQ ID | (SEQ ID |
| | | [VPLSLY]- | PEVKFNWYVDGVEVHNAKTKPREEQ | NO: 34) | NO: 28) |
| | | hIL2(E15L, | YASTYRVVSVLTVLHQDWLNGKEYK | | |
| | | L18C, D20R, | CKVSNKALPAPIEKTISKAKGQPRE | | |
| | | R38A, | PQVYTLPPCRDELTKNQVSLWCLVK | | |
| | | F42A, Y45A, | GFYPSDIAVEWESNGQPENNYKTTP | | |
| | | E62A) | PVLDSDGSFFLYSKLTVDKSRWQQG | | |
| | | | NVFSCSVMHEALHNHYTQKSLSLSP | | |
| | | | G | | |
| | | | (SEQ | | |
| | | | ID | | |
| | | | NO: 12) | | |
| AK454 | DNA187 | Hole: | DKTHTCPPCPAPELLGGPSVFLFPP | PGSGS | AVNGTSQFTCFYNSRANISCVWSQD |
| | | hFc(N297A)- | KPKDTLMISRTPEVTCVVVDVSHED | (SEQ ID | GALQDTSCQVHAWPDRRRWNQTCEL |
| | | hCD122 | PEVKFNWYVDGVEVHNAKTKPREEQ | NO: 14) | LFVSQASWACNLILGAPDSQKLTTV |
| | | | YASTYRVVSVLTVLHQDWLNGKEYK | | DIVTLRVLCREGVRWRVMAIQDFKP |
| | | | CKVSNKALPAPIEKTISKAKGQPRE | | FENLRLMAPISLQVVHVETHRCNIS |
| | | | PQVCTLPPSRDELTKNQVSLSCAVK | | WEISQASHYFERHLEFEARTLSPGH |
| | | | GFYPSDIAVEWESNGQPENNYKTTP | | TWEEAPLLTLKQKQEWICLETLTPD |
| | | | PVLDSDGSFFLVSKLTVDKSRWQQG | | TQYEFQVRVKPLQGEFTTWSPWSQP |
| | | | MVFSCSVMHEALHNHYTQKSLSLSP | | LAFRTKPAALGKD |
| | | | G | | (SEQ ID NO: 4) |
| | | | (SEQ | | |
| | | | ID | | |
| | | | NO: 9) | | |
| AK454 | DNA566 | Knob: | DKTHTCPPCPAPELLGGPSVFLFPP | GSPG | VPLSLY |
| | | hFc(N297A)- | KPKDTLMISRTPEVTCVVVDVSHED | (SEQ ID | (SEQ ID |
| | | [VPLSLY]- | PEVKFNWYVDGVEVHNAKTKPREEQ | NO: 34) | NO: 28) |
| | | hIL2(E15R, | YASTYRVVSVLTVLHQDWLNGKEYK | | |
| | | L18C, D20R, | CKVSNKALPAPIEKTISKAKGQPRE | | |
| | | R38A, | PQVYTLPPCRDELTKNQVSLWCLVK | | |
| | | F42A, Y45A, | GFYPSDIAVEWESNGQPENNYKTTP | | |
| | | E62A) | PVLDSDGSFFLYSKLTVDKSRWQQG | | |
| | | | NVFSCSVMHEALHNHYTQKSLSLSP | | |
| | | | G | | |
| | | | (SEQ | | |
| | | | ID | | |
| | | | NO: 12) | | |
| AK455 | DNA187 | Hole: | DKTHTCPPCPAPELLGGPSVFLFPP | PGSGS | AVNGTSQFTCFYNSRANISCVWSQD |
| | | hFc(N297A)- | KPKDTLMISRTPEVTCVVVDVSHED | (SEQ ID | GALQDTSCQVHAWPDRRRWNQTCEL |
| | | hCD122 | PEVKFNWYVDGVEVHNAKTKPREEQ | NO: 14) | LFVSQASWACNLILGAPDSQKLTTV |
| | | | YASTYRVVSVLTVLHQDWLNGKEYK | | DIVTLRVLCREGVRWRVMAIQDFKP |
| | | | CKVSNKALPAPIEKTISKAKGQPRE | | FENLRLMAPISLQVVHVETHRCNIS |
| | | | PQVCTLPPSRDELTKNQVSLSCAVK | | WEISQASHYFERHLEFEARTLSPGH |
| | | | GFYPSDIAVEWESNGQPENNYKTTP | | TWEEAPLLTLKQKQEWICLETLTPD |
| | | | PVLDSDGSFFLVSKLTVDKSRWQQG | | TQYEFQVRVKPLQGEFTTWSPWSQP |
| | | | MVFSCSVMHEALHNHYTQKSLSLSP | | LAFRTKPAALGKD |
| | | | G | | (SEQ ID NO: 4) |
| | | | (SEQ | | |
| | | | ID | | |
| | | | NO: 9) | | |
| AK455 | DNA567 | Knob: | DKTHTCPPCPAPELLGGPSVFLFPP | GSPG | VPLSLY |
| | | hFc(N297A)- | KPKDTLMISRTPEVTCVVVDVSHED | (SEQ ID | (SEQ ID |
| | | [VPLSLY]- | PEVKFNWYVDGVEVHNAKTKPREEQ | NO: 34) | NO: 28) |
| | | hIL2(L18C, | YASTYRVVSVLTVLHQDWLNGKEYK | | |
| | | D20R, | CKVSNKALPAPIEKTISKAKGQPRE | | |
| | | R38A, | PQVYTLPPCRDELTKNQVSLWCLVK | | |
| | | F42A, Y45A, | GFYPSDIAVEWESNGQPENNYKTTP | | |
| | | E62A) | PVLDSDGSFFLYSKLTVDKSRWQQG | | |
| | | | NVFSCSVMHEALHNHYTQKSLSLSP | | |
| | | | G | | |
| | | | (SEQ | | |
| | | | ID | | |
| | | | NO: 12) | | |
| AK456 | DNA187 | Hole: | DKTHTCPPCPAPELLGGPSVFLFPP | PGSGS | AVNGTSQFTCFYNSRANISCVWSQD |
| | | hFc(N297A)- | KPKDTLMISRTPEVTCVVVDVSHED | (SEQ ID | GALQDTSCQVHAWPDRRRWNQTCEL |
| | | hCD122 | PEVKFNWYVDGVEVHNAKTKPREEQ | NO: 14) | LFVSQASWACNLILGAPDSQKLTTV |
| | | | YASTYRVVSVLTVLHQDWLNGKEYK | | DIVTLRVLCREGVRWRVMAIQDFKP |
| | | | CKVSNKALPAPIEKTISKAKGQPRE | | FENLRLMAPISLQVVHVETHRCNIS |
| | | | PQVCTLPPSRDELTKNQVSLSCAVK | | WEISQASHYFERHLEFEARTLSPGH |
| | | | GFYPSDIAVEWESNGQPENNYKTTP | | TWEEAPLLTLKQKQEWICLETLTPD |
| | | | PVLDSDGSFFLVSKLTVDKSRWQQG | | TQYEFQVRVKPLQGEFTTWSPWSQP |
| | | | MVFSCSVMHEALHNHYTQKSLSLSP | | LAFRTKPAALGKD |
| | | | G | | (SEQ ID NO: 4) |
| | | | (SEQ | | |
| | | | ID | | |
| | | | NO: 9) | | |
| AK456 | DNA568 | Knob: | DKTHTCPPCPAPELLGGPSVFLFPP | GSPG | VPLSLY |
| | | hFc(N297A)- | KPKDTLMISRTPEVTCVVVDVSHED | (SEQ ID | (SEQ ID |
| | | [VPLSLY]- | PEVKFNWYVDGVEVHNAKTKPREEQ | NO: 34) | NO: 28) |
| | | hIL2(E15F, | YASTYRVVSVLTVLHQDWLNGKEYK | | |
| | | L18C, D20R, | CKVSNKALPAPIEKTISKAKGQPRE | | |
| | | R38A, | PQVYTLPPCRDELTKNQVSLWCLVK | | |
| | | F42A, Y45A, | GFYPSDIAVEWESNGQPENNYKTTP | | |
| | | E62A) | PVLDSDGSFFLYSKLTVDKSRWQQG | | |
| | | | NVFSCSVMHE | | |
| | | | ALHNHYTQKSLSLSPG | | |
| | | | (SEQ | | |
| | | | ID | | |
| | | | NO: 12) | | |
| AK462 | DNA530 | Knob: | VRSGCKPCICTVPEVSSVFIFPPKP | GGSSPP | APTSSSTKKTQLQLEHLLLDLQMIL |
| | | mFcIgG1 | KDVLTITLTPKVTCVVVAISKDDPE | GGGSS | NGINNYKNPKLTAMLTAKFAMPKKA |
| | | (DAPG)- | VQFSWFVDDVEVHTAQTQPREEQFN | GG | TELKHLQCLEEALKPLEEVLNLAQS |
| | | hIL2(R38A, | STFRSVSELPIMHQDWLKGKEFKCR | GSGP | KNFHLRPRDLISNINVIVLELKGSE |
| | | F42A, Y45A, | VNSAAFGAPIEKTISKTKGRPKAPQ | (SEQ ID | TTFMCEYADETATIVEFLNRWITFA |
| | | | VYTIPPPKEQMAKDKVSLTCMITDF | NO: 23) | QSIISTLT |
| | | | FPEDITVEWQWNGQPAENYDNTQPI | | (SEQ ID |
| | | | MDTDGSYFVYSDLNVQKSNWEAGNT | | NO: 3) |
| | | | FTCSVLHEGLHNHHTEKSLSHSPG | | |
| | | | (SEQ | | |
| | | | ID | | |
| | | E62A) | NO: 283) | | |
| AK462 | DNA532 | Hole: | VRSGCKPCICTVPEVSSVFIFPPKP | | |
| | | mFcIgG1 | KDVLTITLTPKVTCVVVAISKDDPE | | |
| | | (DAPG) | VQFSWFVDDVEVHTAQTQPREEQFN | | |
| | | | STFRSVSELPIMHQDWLKGKEFKCR | | |
| | | | VNSAAFGAPIEKTISKTKGRPKAPQ | | |
| | | | VYTIPPPKKQMAKDKVSLTCMITDF | | |
| | | | FPEDITVEWQWNGQPAENYKNTQPI | | |
| | | | MKTDGSYFVYSKLNVQKSNWEAGNT | | |
| | | | FTCSVLHEGLHNHHTEKSLSHSPG | | |
| | | | (SEQ | | |
| | | | ID | | |
| | | | NO: 284) | | |
| AK463 | DNA530 | Knob: | VRSGCKPCICTVPEVSSVFIFPPKP | GSSPPG | APTSSSTKKTQLQLEHLLLDLQMIL |
| | | mFcIgG1 | KDVLTITLTPKVTCVVVAISKDDPE | GGSSGG | NGINNYKNPKLTAMLTAKFAMPKKA |
| | | (DAPG)- | VQFSWFVDDVEVHTAQTQPREEQFN | GSGP | TELKHLQCLEEALKPLEEVLNLAQS |
| | | hIL2(R38A, | STFRSVSELPIMHQDWLKGKEFKCR | (SEQ ID | KNFHLRPRDLISNINVIVLELKGSE |
| | | F42A, Y45A, | VNSAAFGAPIEKTISKTKGRPKAPQ | NO: 23) | TTFMCEYADETATIVEFLNRWITFA |
| | | E62A) | VYTIPPPKEQMAKDKVSLTCMITDF | | QSIISTLT |
| | | | FPEDITVEWQWNGQPAENYDNTQPI | | (SEQ ID |
| | | | MDTDGSYFVYSDLNVQKSNWEAGNT | | NO: 3) |
| | | | FTCSVLHEGLHNHHTEKSLSHSPG | | |
| | | | (SEQ | | |
| | | | ID | | |
| | | | NO: 283) | | |
| AK463 | DNA533 | Hole: | VRSGCKPCICTVPEVSSVFIFPPKP | PGSGS (SEQ ID | AVNGTSQFTCFYNSRANISCVWSQD |
| | | mFcIgG1 | KDVLTITLTPKVTCVVVAISKDDPE | NO: 14) | GALQDTSCQVHAWPDRRRWNQTCEL |
| | | (DAPG)- | VQFSWFVDDVEVHTAQTQPREEQFN | | LFVSQASWACNLILGAPDSQKLTTV |
| | | hCD122 | STFRSVSELPIMHQDWLKGKEFKCR | | DIVTLRVLCREGVRWRVMAIQDFKP |
| | | | VNSAAFGAPIEKTISKTKGRPKAPQ | | FENLRLMAPISLQVVHVETHRCNIS |
| | | | VYTIPPPKKQMAKDKVSLTCMITDF | | WEISQASHYFERHLEFEARTLSPGH |
| | | | FPEDITVEWQWNGQPAENYKNTQPI | | TWEEAPLLTLKQKQEWICLETLTPD |
| | | | MKTDGSYFVYSKLNVQKSNWEAGNT | | TQYEFQVRVKPLQGEFTTWSPWSQP |
| | | | FTCSVLHEGLHNHHTEKSLSHSPG | | LAFRTKPAALGKD |
| | | | (SEQ | | (SEQ ID NO: 4) |
| | | | ID | | |
| | | | NO: 284) | | |
| AK464 | DNA530 | Knob: | VRSGCKPCICTVPEVSSVFIFPPKP | GSSPPGGGSSGG | APTSSSTKKTQLQLEHLLLDLQMIL |
| | | mFcIgG1 | KDVLTITLTPKVTCVVVAISKDDPE | GSGP | NGINNYKNPKLTAMLTAKFAMPKKA |
| | | (DAPG)- | VQFSWFVDDVEVHTAQTQPREEQFN | (SEQ ID | TELKHLQCLEEALKPLEEVLNLAQS |
| | | hIL2(R38A, | STFRSVSELPIMHQDWLKGKEFKCR | NO: 23) | KNFHLRPRDLISNINVIVLELKGSE |
| | | F42A, Y45A, | VNSAAFGAPIEKTISKTKGRPKAPQ | | TTFMCEYADETATIVEFLNRWITFA |
| | | E62A) | VYTIPPPKEQMAKDKVSLTCMITDF | | QSIISTLT |
| | | | FPEDITVEWQWNGQPAENYDNTQPI | | (SEQ ID |
| | | | MDTDGSYFVYSDLNVQKSNWEAGNT | | NO: 3) |
| | | | FTCSVLHEGLHNHHTEKSLSHSPG | | |
| | | | (SEQ | | |
| | | | ID | | |
| | | | NO: 283) | | |
| AK464 | DNA534 | Hole: | VRSGCKPCICTVPEVSSVFIFPPKP | PGSGS (SEQ ID | AVKNCSHLECFYNSRANVSCMWSHE |
| | | mFcIgG1 | KDVLTITLTPKVTCVVVAISKDDPE | NO: 14) | EALNVTTCHVHAKSNLRHWNKTCEL |
| | | (DAPG)- | VQFSWFVDDVEVHTAQTQPREEQFN | | TLVRQASWACNLILGSFPESQSLTS |
| | | hCD122 | STFRSVSELPIMHQDWLKGKEFKCR | | VDLLDINVVCWEEKGWRRVKTCDFH |
| | | | VNSAAFGAPIEKTISKTKGRPKAPQ | | PFDNLRLVAPHSLQVLHIDTQRCNI |
| | | | VYTIPPPKKQMAKDKVSLTCMITDF | | SWKVSQVSHYIEPYLEFEARRRLLG |
| | | | FPEDITVEWQWNGQPAENYKNTQPI | | HSWEDASVLSLKQRQQWLFLEMLIP |
| | | | MKTDGSYFVYSKLNVQKSNWEAGNT | | STSYEVQVRVKAORNN |
| | | | FTCSVLHEGLHNHHTEKSLSHSPG | | TGTWSPWSQPLTFRTRPADPVIKF |
| | | | (SEQ | | (SEQ ID |
| | | | ID | | NO: 326) |
| | | | NO: 284) | | |
| AK465 | DNA531 | Knob: | VRSGCKPCICTVPEVSSVFIFPPKP | GSPG (SEQ ID | VPLSY |
| | | mFcIgG1 | KDVLTITLTPKVTCVVVAISKDDPE | NO: 34) | (SEQ ID |
| | | (DAPG)- | VQFSWFVDDVEVHTAQTQPREEQFN | | NO: 28) |
| | | [VPLSLY] | STFRSVSELPIMHQDWLKGKEFKCR | | |
| | | hIL2(R38A, | VNSAAFGAPIEKTISKTKGRPKAPQ | | |
| | | F42A, Y45A, | VYTIPPPKEQMAKDKVSLTCMITDF | | |
| | | E62A) | FPEDITVEWQWNGQPAENYDNTQPI | | |
| | | | MDTDGSYFVYSDLNVQKSNWEAGNT | | |
| | | | FTCSVLHEGLHNHHTEKSLSHSPG | | |
| | | | (SEQ | | |
| | | | ID | | |
| | | | NO: 283) | | |
| AK466 | DNA5332 | Hole: | VRSGCKPCICTVPEVSSVFIFPPKP | | |
| | | mFcIgG1 | KDVLTITLTPKVTCVVVAISKDDPE | | |
| | | (DAPG) | VQFSWFVDDVEVHTAQTQPREEQFN | | |
| | | | STFRSVSELPIMHQDWLKGKEFKCR | | |
| | | | VNSAAFGAPIEKTISKTKGRPKAPQ | | |
| | | | VYTIPPPKKQMAKDKVSLTCMITDF | | |
| | | | FPEDITVEWQWNGQPAENYKNTQPI | | |
| | | | MKTDGSYFVYSKLNVQKSNWEAGNT | | |
| | | | FTCSVLHEGLHNHHTEKSLSHSPG | | |
| | | | (SEQ | | |
| | | | ID | | |
| | | | NO: 284) | | |
| AK466 | DNA531 | Knob: | VRSGCKPCICTVPEVSSVFIFPPKP | GSPG | VPLSY |
| | | mFcIgG1 | KDVLTITLTPKVTCVVVAISKDDPE | (SEQ ID | (SEQ ID |
| | | (DAPG)- | VQFSWFVDDVEVHTAQTQPREEQFN | NO: 34) | NO: 28) |
| | | [VPL51Y]- | STFRSVSELPIMHQDWLKGKEFKCR | | |
| | | hIL2(R38A, | VNSAAFGAPIEKTISKTKGRPKAPQ | | |
| | | F42A, | VYTIPPPKEQMAKDKVSLTCMITDF | | |
| | | Y45A, E52 | FPEDITVEWQWNGQPAENYDNTQPI | | |
| | | A, | MDTDGSYFVYSDLNVQKSNWEAGNT | | |
| | | C125A) | FTCSVLHEGLHNHHTEKSLSHSPG | | |
| | | | (SEQ | | |
| | | | ID | | |
| | | | NO: 283) | | |
| AK466 | DNA533 | Hole: | VRSGCKPCICTVPEVSSVFIFPPKP | PGSGS | AVNGTSQFTCFYNSRANISCVWSQD |
| | | mFcIgG1 | KDVLTITLTPKVTCVVVAISKDDPE | (SEQ ID | GALQDTSCQVHAWPDRRRWNQTCEL |
| | | (DAPG)- | VQFSWFVDDVEVHTAQTQPREEQFN | NO: 14) | LFVSQASWACNLILGAPDSQKLTTV |
| | | hCD122 | STFRSVSELPIMHQDWLKGKEFKCR | | DIVTLRVLCREGVRWRVMAIQDFKP |
| | | | VNSAAFGAPIEKTISKTKGRPKAPQ | | FENLRLMAPISLQVVHVETHRCNIS |
| | | | VYTIPPPKKQMAKDKVSLTCMITDF | | WEISQASHYFERHLEFEARTLSPGH |
| | | | FPEDITVEWQWNGQPAENYKNTQPI | | TWEEAPLLTLKQKQEWICLETLTPD |
| | | | MKTDGSYFVYSKLNVQKSNWEAGNT | | TQYEFQVRVKPLQGEFTTWSPWSQP |
| | | | FTCSVLHEGLHNHHTEKSLSHSPG | | LAFRTKPAALGKD |
| | | | (SEQ | | (SEQ ID NO: 4) |
| | | | ID | | |
| | | | NO: 284) | | |
| AK467 | DNA531 | Knob: mFcIgG1 | VRSGCKPCICTVPEVSSVFIFPPKP | GSPG | VPLSY |
| | | (DAPG)-[VPLSLY]- | KDVLTITLTPKVTCVVVAISKDDPE | (SEQ ID | (SEQ ID |
| | | hIL2(R38A, F42A, | VQFSWFVDDVEVHTAQTQPREEQFN | NO: 34) | NO: 28) |
| | | Y45A, ES2A, | STFRSVSELPIMHQDWLKGKEFKCR | | |
| | | C325A) | VNSAAFGAPIEKTISKTKGRPKAPQ | | |
| | | | VYTIPPPKEQMAKDKVSLTCMITDF | | |
| | | | FPEDITVEWQWNGQPAENYDNTQPI | | |
| | | | MDTDGSYFVYSDLNVQKSNWEAGNT | | |
| | | | FTCSVLHEGLHNHHTEKSLSHSPG | | |
| | | | (SEQ | | |
| | | | ID | | |
| | | | NO: 283) | | |
| AK467 | DNA534 | Hole: mFcIgG1 | VRSGCKPCICTVPEVSSVFIFPPKP | PGSGS | AVKNCSHLECFYNSRANVSCMWSHE |
| | | (DAPG)-hCD122 | KDVLTITLTPKVTCVVVAISKDDPE | (SEQ ID | EALNVTTCHVHAKSNLRHWNKTCEL |
| | | | VQFSWFVDDVEVHTAQTQPREEQFN | NO: 14) | TLVRQASWACNLILGSFPESQSLTS |
| | | | STFRSVSELPIMHQDWLKGKEFKCR | | VDLLDINVVCWEEKGWRRVKTCDFH |
| | | | VNSAAFGAPIEKTISKTKGRPKAPQ | | PFDNLRLVAPHSLQVLHIDTQRCNI |
| | | | VYTIPPPKKQMAKDKVSLTCMITDF | | SWKVSQVSHYIEPYLEFEARRRLLG |
| | | | FPEDITVEWQWNGQPAENYKNTQPI | | HSWEDASVLSLKQRQQWLFLEMLIP |
| | | | MKTDGSYFVYSKLNVQKSNWEAGNT | | STSYEVQVRVKAORNN |
| | | | FTCSVLHEGLHNHHTEKSLSHSPG | | TGTWSPWSQPLTFRTRPADPVIKF |
| | | | (SEQ | | (SEQ ID |
| | | | ID | | NO: 326) |
| | | | NO: 284) | | |
| AKA68 | DNA576 | Hole: hFc(N237A, | DKTHTCPPCPAPELLGGPSVFLFPP | PGSGS | AVNGTSQFTCFYNSRANISCVWSQD |
| | | M2S2Y, S254T, | KPKDTLYITREPEVTCVVVDVSHED | (SEQ ID | GALQDTSCQVHAWPDRRRWNQTCEL |
| | | T256E)-hCD122 | PEVKFNWYVDGVEVHNAKTKPREEQ | NO: 14) | LFVSQASWACNLILGAPDSQKLTTV |
| | | | YASTYRVVSVLTVLHQDWLNGKEYK | | DIVTLRVLCREGVRWRVMAIQDFKP |
| | | | CKVSNKALPAPIEKTISKAKGQPRE | | FENLRLMAPISLQVVHVETHRCNIS |
| | | | PQVCTLPPSRDELTKNQVSLSCAVK | | WEISQASHYFERHLEFEARTLSPGH |
| | | | GFYPSDIAVEWESNGQPENNYKTTP | | TWEEAPLLTLKQKQEWICLETLTPD |
| | | | PVLDSDG | | TQYEFQVRVKPLQGEFTTWSPWSQP |
| | | | SPFLVSKLTVDKSRWQGQMVFSCSV | | LAFRTKPAALGKD |
| | | | MHEALHNHYTQKSLSLSPG | | (SEQ ID |
| | | | (SEQ | | NO: 4) |
| | | | ID | | |
| | | | NO: 292) | | |
| AK468 | DNA580 | Knob: hFc(N297A, | DKTHTCPPCPAPELLGGPSVFLFPP | GSPG | VPLSY |
| | | M252Y, S254T, | KPKDTLYITREPEVTCVVVDVSHED | (SEQ ID | (SEQ ID |
| | | T2S6E)-[VPLSLY]- | PEVKFNWYVDGVEVHNAKTKPREEQ | NO: 34) | NO: 28) |
| | | hIL2(R38A, F42A, | YASTYRVVSVLTVLHQDWLNGKEYK | | |
| | | Y45A, E52A, | CKVSNKALPAPIEKTISKAKGQPRE | | |
| | | C125A) | PQVYTLPPCRDELTKNQVSLWCLVK | | |
| | | | GFYPSDIAVEWESNGQPENNYKTTP | | |
| | | | PVLDSDGSFFLYSKLTVDKSRWQQG | | |
| | | | NVPSCSVMHEALHNHYTQKSLSLSP | | |
| | | | G | | |
| | | | (SEQ | | |
| | | | ID | | |
| | | | NO: 294) | | |
| AK469 | DNA575 | Hole: | DKTHTCPPCPAPELLGGPSVFLFPP | PGSGS | AVNGTSQFTCFYNSRANISCVWSQD |
| | | hFc(N297A, | KPKDTLMASRTPEVTCVVVDVSHED | (SEQ ID | GALQDTSCQVHAWPDRRRWNQTCEL |
| | | I253A)- | PEVKFNWYVDGVEVHNAKTKPREEQ | NO: 14) | LFVSQASWACNLILGAPDSQKLTTV |
| | | hCD122 | YASTYRVVSVLTVLHQDWLNGKEYK | | DIVTLRVLCREGVRWRVMAIQDFKP |
| | | | CKVSNKALPAPIEKTISKAKGQPRE | | FENLRLMAPISLQVVHVETHRCNIS |
| | | | PQVCTLPPSRDELTKNQVSLSCAVK | | WEISQASHYFERHLEFEARTLSPGH |
| | | | GFYPSDfAVEWESNIGQPENNYKTT | | TWEEAPLLTLKQKQEWICLETLTPD |
| | | | PPVLDSDGSFFLVSK | | TQYEFQVRVKPLQGEFTTWSPWSQP |
| | | | LTVDKSRWQQGNVFSCSVMHEALHN | | LAFRTKPAALGKD |
| | | | HYTQKSLSLSPG | | (SEQ ID NO: 4) |
| | | | (SEQ | | |
| | | | ID | | |
| | | | NO: 10) | | |
| AK469 | DNA577 | Knob: | DKTHTCPPCPAPELLGGPSVFLFPP | GSSPPG | APTSSSTKKTQLQLEHLLLDLQMIL |
| | | hFc(N297, | KPKDTLMASRTPEVTCVVVDVSHED | GGSSGG | NGINNYKNPKLTAMLTAKFAMPKKA |
| | | I253A)- | PEVKFNWYVDGVEVHNAKTKPREEQ | GSGP | TELKHLQCLEEALKPLEEVLNLAQS |
| | | hIL2 | YASTYRVVSVLTVLHQDWLNGKEYK | (SEQ ID | KNFHLRPRDLISNINVIVLELKGSE |
| | | (R38A, F42A, | CKVSNKALPAPIEKTISKAKGQFRE | NO: 23) | TTFMCEYADETATIVEFLNRWITFA |
| | | Y45A, E52A, | PQVYTLPPCRDELTKNQVSLWCLVK | | QSIISTLT |
| | | C125A) | GFYPSDIAVEWESNGQPENNYKTTP | | (SEQ ID |
| | | | PVLDSDGSFFLYSKLTVDKSRWQQG | | NO: 3) |
| | | | NVFSCSVMHEALHNHYTQKSLSLSP | | |
| | | | G | | |
| | | | (SEQ | | |
| | | | ID | | |
| | | | NO: 13) | | |
| AK470 | DNA576 | Hole: | DKTHTCPPCPAPELLGGPSVFLFPP | PGSGS | AVNGTSQFTCFYNSRANISCVWSQD |
| | | hFc(N297A, | KPKDTLYITREPEVTCVVVDVSHED | (SEQ ID | GALQDTSCQVHAWPDRRRWNQTCEL |
| | | M252Y, | PEVKFNWYVDGVEVHNAKTKPREEQ | NO: 14) | LFVSQASWACNLILGAPDSQKLTTV |
| | | S254T, | YASTYRVVSVLTVLHQDWLNGKEYK | | DIVTLRVLCREGVRWRVMAIQDFKP |
| | | T256E)- | CKVSNKALPAPIEKTISKAKGQPRE | | FENLRLMAPISLQVVHVETHRCNIS |
| | | hCD122 | PQVCTLPPSRDELTKNQVSLSCAVK | | WEISQASHYFERHLEFEARTLSPGH |
| | | | GFYPSDIAVEWESNGQPENNYKTTP | | TWEEAPLLTLKQKQEWICLETLTPD |
| | | | PVLDSDGSPFLVSKLTVDKSRWQGQ | | TQYEFQVRVKPLQGEFTTWSPWSQP |
| | | | MVFSCSVMHEALHNHYTQKSLSLSP | | LAFRTKPAALGKD |
| | | | G | | (SEQ ID NO: 4) |
| | | | (SEQ | | |
| | | | ID | | |
| | | | NO: 292) | | |
| AK470 | DNA578 | Knob: | DKTHTCPPCPAPELLGGPSVFLFPP | GSSPP | APTSSSTKKTQLQLEHLLLDLQMIL |
| | | hFc(N297A, | KPKDTLYITREPEVTCVVVDVSHED | GGGSS | NGINNYKNPKLTAMLTAKFAMPKKA |
| | | M252Y, | PEVKFNWYVDGVEVHNAKTKPREEQ | GG | TELKHLQCLEEA |
| | | 52547, | YASTYRVVSVLTVLHQDWLNGKEYK | GSGP | LKPLEEVLNLAQSKNFHLRPRDLIS |
| | | T256E)- | CKVSNKALPAPIEKTISKAKGQPRE | (SEQ ID | NINVIVLELKGSETTFMCEYADETA |
| | | hIL2(R38A, | PQVYTLPPCRDELTKNQVSLWCLVK | NO: 23) | TIVEFLNRWITFAQSIISTLT |
| | | F42A, | GFYPSDIAVEWESNGQPENNYKTTP | | (SEQ ID |
| | | Y45A, E62A, | PVLDSDGSFFLYSKLTVDKSRWQQG | | NO: 3) |
| | | C125A) | NVPSCSVMHEALHNHYTQKSLSLSP | | |
| | | | G | | |
| | | | (SEQ | | |
| | | | ID | | |
| | | | NO: 294) | | |
| AK471 | DNA57S | Hole: | DKTHTCPPCPAPELLGGPSVFLFPP | PGSGS | AVNGTSQFTCFYNSRANISCVWSQD |
| | | hFc(N297A, | KPKDTLMASRTPEVTCVVVDVSHED | (SEQ ID | GALQDTSCQVHAWPDRRRWNQTCEL |
| | | I253A)- | PEVKFNWYVDGVEVHNAKTKPREEQ | NO: 14) | LFVSQASWACNLILGAPDSQKLTTV |
| | | HCD122 | YASTYRVVSVLTVLHQDWLNGKEYK | | DIVTLRVLCREGVRWRVMAIQDFKP |
| | | | CKVSNKALPAPIEKTISKAKGQPRE | | FENLRLMAPISLQVVHVETHRCNIS |
| | | | PQVCTLPPSRDELTKNQVSLSCAVK | | WEISQASHYFERHLEFEARTLSPGH |
| | | | GFYPSDfAVEWESNIGQPENNYKTT | | TWEEAPLLTLKQKQEWICLETLTPD |
| | | | PPVLDSDGSFFLVSK | | TQYEFQVRVKPLQGEFTTWSPWSQP |
| | | | LTVDKSRWQQGNVFSCSVMHEALHN | | LAFRTKPAALGKD |
| | | | HYTQKSLSLSPG | | (SEQ ID NO: 4) |
| | | | (SEQ | | |
| | | | ID | | |
| | | | NO: 10) | | |
| AK471 | DNA579 | Knob: | DKTHTCPPCPAPELLGGPSVFLFPP | GSPG | VPLSLY |
| | | hFc(M297, | KPKDTLMASRTPEVTCVVVDVSHED | (SEQ ID | (SEQ ID |
| | | I253A)- | PEVKFNWYVDGVEVHNAKTKPREEQ | NO: 34) | NO: 28) |
| | | [VPLSLY]- | YASTYRVVSVLTVLHQDWLNGKEYK | | |
| | | hIL2(R38A, | CKVSNKALPAPIEKTISKAKGQFRE | | |
| | | F42A, Y45A, | PQVYTLPPCRDELTKNQVSLWCLVK | | |
| | | E62A, | GFYPSDIAVEWESNGQPENNYKTTP | | |
| | | C125A) | PVLDSDGSFFLYSKLTVDKSRWQQG | | |
| | | | NVFSCSVMHEALHNHYTQKSLSLSP | | |
| | | | G | | |
| | | | (SEQ | | |
| | | | ID | | |
| | | | NO: 13) | | |
| AK475 | DNA255 | Knob: | DKTHTCPPCPAPELLGGPSVFLFPP | GSSPPG | |
| | | hFc(N297A) | KPKDTLMISRTPEVTCVVVDVSHED | GGSSGG | |
| | | hIL2 | PEVKFNWYVDGVEVHNAKTKPREEQ | GSGP | |
| | | (R38A, | YASTYRVVSVLTVLHQDWLNGKEYK | (SEQ ID | |
| | | F42A, Y45A, | CKVSNKALPAPIEKTISKAKGQPRE | NO: 23) | |
| | | | PQVYTLPPCRDELTKNQVSLWCLVK | | |
| | | | GFYPSDIAVEWESNGQPENNYKTTP | | |
| | | | PVLDSDGSFFLYSKLTVDKSRWQQG | | |
| | | | NVFSCSVMHEALHNHYTQKSLSLSP | | APTSSSTKKTQLQLEHLLLDLQMIL |
| | | | G | | NGINNYKNPKLTAMLTAKFAMPKKA |
| | | | (SEQ | | TELKHLQCLEEALKPLEEVLNLAQS |
| | | | ID | | KNFHLRPRDLISNINVIVLELKGSE |
| | | | NO: 12) | | TTFMCEYADETATIVEFLNRWITFA |
| | | | | | QSIISTLT |
| | | | | | (SEQ ID |
| | | E62A, C123A) | | | NO: 3) |
| AK475 | DNA528 | Hole: | DKTHTCPPCPAPELLGGPSVFLFPP | PGSGS | AVNGTSQFTCFYNSRANISCVWSQD |
| | | hFc(N297A)- | KPKDTLMISRTPEVTCVVVDVSHED | (SEQ ID | GALQDTSCQVHAWPDRRRWNQTCEL |
| | | hCD122 | PEVKFNWYVDGVEVHNAKTKPREEQ | NO: 14) | LPVSQASWACNLILGAPDSQLTTVD |
| | | (C1688S) | YASTYRVVSVLTVLHQDWLNGKEYK | | IVTLRVLCREGVRWRVMAIQDFKPF |
| | | | CKVSNKALPAPIEKTISKAKGQPRE | | ENLRLMAPISLQVVHVETHRCNISW |
| | | | PQVCTLPPSRDELTKNQVSLSCAVK | | EISQASHYFERHLEFEARTLSPGHT |
| | | | GFYPSDIAVEWESNGQPENNYKTTP | | WEEAPLLTLKQKQEWISLETLTPDT |
| | | | PVLDSDGSFFLVSKLTVDKSRWQQG | | QYEFQVRVKPLQGEFTTWSPWSQPL |
| | | | MVFSCSVMHEALHNHYTQKSLSLSP | | AFRTKPAALGKD |
| | | | G | | (SEQ ID |
| | | | (SEQ | | NO: 327) |
| | | | ID | | |
| | | | NO: 9) | | |
| AK476 | DNA263 | Knob: | DKTHTCPPCPAPELLGGPSVFLFPP | GSPG | VPLSLY |
| | | hFc(N297A)- | KPKDTLMISRTPEVTCVVVDVSHED | (SEQ ID | (SEQ ID |
| | | [VPLSLY]- | PEVKFNWYVDGVEVHNAKTKPREEQ | NO: 34) | NO: 28) |
| | | hIL2 | YASTYRVVSVLTVLHQDWLNGKEYK | | |
| | | (R38A, | CKVSNKALPAPIEKTISKAKGQPRE | | |
| | | F42A, Y45A, | PQVYTLPPCRDELTKNQVSLWCLVK | | |
| | | E62A, C123A) | GFYPSDIAVEWESNGQPENNYKTTP | | |
| | | | PVLDSDGSFFLYSKLTVDKSRWQQG | | |
| | | | NVFSCSVMHE | | |
| | | | ALHNHYTQKSLSLSPG | | |
| | | | (SEQ | | |
| | | | ID | | |
| | | | NO: 12) | | |
| AK476 | DNA528 | Hole: | DKTHTCPPCPAPELLGGPSVFLFPP | PGSGS | AVNGTSQFTCFYNSRANISCVWSQD |
| | | hFc(N297A)- | KPKDTLMISRTPEVTCVVVDVSHED | (SEQ ID | GALQDTSCQVHAWPDRRRWNQTCEL |
| | | hCD122 | PEVKFNWYVDGVEVHNAKTKPREEQ | NO: 14) | LPVSQASWACNLILGAPDSQLTTVD |
| | | (C1688S) | YASTYRVVSVLTVLHQDWLNGKEYK | | IVTLRVLCREGVRWRVMAIQDFKPF |
| | | | CKVSNKALPAPIEKTISKAKGQPRE | | ENLRLMAPISLQVVHVETHRCNISW |
| | | | PQVCTLPPSRDELTKNQVSLSCAVK | | EISQASHYFERHLEFEARTLSPGHT |
| | | | GFYPSDIAVEWESNGQPENNYKTTP | | WEEAPLLTLKQKQEWISLETLTPDT |
| | | | PVLDSDGSFFLVSKLTVDKSRWQQG | | QYEFQVRVKPLQGEFTTWSPWSQPL |
| | | | MVFSCSVMHEALHNHYTQKSLSLSP | | AFRTKPAALGKD |
| | | | G | | (SEQ ID |
| | | | (SEQ | | NO: 327) |
| | | | ID | | |
| | | | NO: 9) | | |
| AK477 | DNA158 | Hole: hFc | DKTHTCPPCPAPELLGGPSVFLFPP | | |
| | | (N297A) | KPKDTLMISRTPEVTCVVVDVSHED | | |
| | | | PEVKFNWYVDGVEVHNAKTKPREEQ | | |
| | | | YASTYRVVSVLTVLHQDWLNGKEYK | | |
| | | | CKVSNKALPAPIEKTISKAKGQPRE | | |
| | | | PQVCTLPPSRDELTKNQVSLSCAVK | | |
| | | | GFYPSDIAVEWESNGQPENNYKTTP | | |
| | | | PVLDSDGSFFLVSKLTVDKSRWQQG | | |
| | | | MVFSCSVMHEALHNHYTQKSLSLSP | | |
| | | | G | | |
| | | | (SEQ | | |
| | | | ID | | |
| | | | NO: 9) | | |
| AK477 | DNA554 | Knob: | DKTHTCPPCPAPELLGGPSVFLFPP | GSPG | VPLSLY |
| | | hFc(N297A)- | KPKDTLMISRTPEVTCVVVDVSHED | (SEQ ID | (SEQ ID |
| | | [VPLSLY]- | PEVKFNWYVDGVEVHNAKTKPREEQ | NO: 34) | NO: 28) |
| | | hIL2 | YASTYRVVSVLTVLHQDWLNGKEYK | | |
| | | (E15R, L18C, | CKVSNKALPAPIEKTISKAKGQPRE | | |
| | | D20R, R38A, | PQVYTLPPCRDELTKNQVSLWCLVK | | |
| | | F42A, Y45A, | GFYPSDIAVEWESNGQPENNYKTTP | | |
| | | E62A) | PVLDSDGSFFLYSKLTVDKSRWQQG | | |
| | | | NVFSCSVMHE | | |
| | | | ALHNHYTQKSLSLSPG | | |
| | | | (SEQ | | |
| | | | ID | | |
| | | | NO: 12) | | |
| AK484 | DNA158 | Hole: hFc | DKTHTCPPCPAPELLGGPSVFLFPP | | |
| | | (N297A) | KPKDTLMISRTPEVTCVVVDVSHED | | |
| | | | PEVKFNWYVDGVEVHNAKTKPREEQ | | |
| | | | YASTYRVVSVLTVLHQDWLNGKEYK | | |
| | | | CKVSNKALPAPIEKTISKAKGQPRE | | |
| | | | PQVCTLPPSRDELTKNQVSLSCAVK | | |
| | | | GFYPSDIAVEWESNGQPENNYKTTP | | |
| | | | PVLDSDGSFFLVSKLTVDKSRWQQG | | |
| | | | MVFSCSVMHEALHNHYTQKSLSLSP | | |
| | | | G | | |
| | | | (SEQ | | |
| | | | ID | | |
| | | | NO: 9) | | |
| AK484 | DNA581 | Knob: | DKTHTCPPCPAPELLGGPSVFLFPP | GSPG | VPLSLY |
| | | hFc(N297A)- | KPKDTLMISRTPEVTCVVVDVSHED | (SEQ ID | (SEQ ID |
| | | [VPLSLY]- | PEVKFNWYVDGVEVHNAKTKPREEQ | NO: 34) | NO: 28) |
| | | hIL2 | YASTYRVVSVLTVLHQDWLNGKEYK | | |
| | | (L18C, R38A, | CKVSNKALPAPIEKTISKAKGQPRE | | |
| | | F42A, Y45A, | PQVYTLPPCRDELTKNQVSLWCLVK | | |
| | | E62A) | GFYPSDIAVEWESNGQPENNYKTTP | | |
| | | | PVLDSDGSFFLYSKLTVDKSRWQQG | | |
| | | | NVFSCSVMHEALHNHYTQKSLSLSP | | |
| | | | G | | |
| | | | (SEQ | | |
| | | | ID | | |
| | | | NO: 12) | | |
| AK485 | DNA158 | Hole: hFc | DKTHTCPPCPAPELLGGPSVFLFPP | | |
| | | (N297A) | KPKDTLMISRTPEVTCVVVDVSHED | | |
| | | | PEVKFNWYVDGVEVHNAKTKPREEQ | | |
| | | | YASTYRVVSVLTVLHQDWLNGKEYK | | |
| | | | CKVSNKALPAPIEKTISKAKGQPRE | | |
| | | | PQVCTLPPSRDELTKNQVSLSCAVK | | |
| | | | GFYPSDIAVEWESNGQPENNYKTTP | | |
| | | | PVLDSDGSFFLVSKLTVDKSRWQQG | | |
| | | | MVFSCSVMHEALHNHYTQKSLSLSP | | |
| | | | G | | |
| | | | (SEQ | | |
| | | | ID | | |
| | | | NO: 9) | | |
| AK485 | DNA582 | Knob: | DKTHTCPPCPAPELLGGPSVFLFPP | GSPG | VPLSLY |
| | | hFc(N297A)- | KPKDTLMISRTPEVTCVVVDVSHED | (SEQ ID | (SEQ ID |
| | | [VPLSLY]- | PEVKFNWYVDGVEVHNAKTKPREEQ | NO: 34) | NO: 28) |
| | | hIL2 | YASTYRVVSVLTVLHQDWLNGKEYK | | |
| | | (H16Y, R38A, | CKVSNKALPAPIEKTISKAKGQPRE | | |
| | | F42A, Y45A, | PQVYTLPPCRDELTKNQVSLWCLVK | | |
| | | E62A, C125A) | GFYPSDIAVEWESNGQPENNYKTTP | | |
| | | | PVLDSDGSFFLYSKLTVDKSRWQQG | | |
| | | | NVFSCSVMHEALHNHYTQKSLSLSP | | |
| | | | G | | |
| | | | (SEQ | | |
| | | | ID | | |
| | | | NO: 12) | | |
| AK486 | DNA158 | Hole: hFc | DKTHTCPPCPAPELLGGPSVFLFPP | | |
| | | (N297A) | KPKDTLMISRTPEVTCVVVDVSHED | | |
| | | | PEVKFNWYVDGVEVHNAKTKPREEQ | | |
| | | | YASTYRVVSVLTVLHQDWLNGKEYK | | |
| | | | CKVSNKALPAPIEKTISKAKGQPRE | | |
| | | | PQVCTLPPSRDELTKNQVSLSCAVK | | |
| | | | GFYPSDIAVEWESNGQPENNYKTTP | | |
| | | | PVLDSDGSFFLVSKLTVDKSRWQQG | | |
| | | | MVFSCSVMHEALHNHYTQKSLSLSP | | |
| | | | G | | |
| | | | (SEQ | | |
| | | | ID | | |
| | | | NO: 9) | | |
| AK486 | DNA583 | Knob: | DKTHTCPPCPAPELLGGPSVFLFPP | GSPG | VPLSLY |
| | | hFc(N297A)- | KPKDTLMISRTPEVTCVVVDVSHED | (SEQ ID | (SEQ ID |
| | | [VPLSLY]- | PEVKFNWYVDGVEVHNAKTKPREEQ | NO: 34) | NO: 28) |
| | | hIL2 | YASTYRVVSVLTVLHQDWLNGKEYK | | |
| | | (H16E, R38A, | CKVSNKALPAPIEKTISKAKGQPRE | | |
| | | F42A, Y45A, | PQVYTLPPCRDELTKNQVSLWCLVK | | |
| | | E62A, C125A) | GFYPSDIAVEWESNGQPENNYKTTP | | |
| | | | PVLDSDGSFFLYSKLTVDKSRWQQG | | |
| | | | NVFSCSVMHEALHNHYTQKSLSLSP | | |
| | | | G | | |
| | | | (SEQ | | |
| | | | ID | | |
| | | | NO: 12) | | |
| AK487 | DNA158 | Hole: hFc | DKTHTCPPCPAPELLGGPSVFLFPP | | |
| | | (N297A) | KPKDTLMISRTPEVTCVVVDVSHED | | |
| | | | PEVKFNWYVDGVEVHNAKTKPREEQ | | |
| | | | YASTYRVVSVLTVLHQDWLNGKEYK | | |
| | | | CKVSNKALPAPIEKTISKAKGQPRE | | |
| | | | PQVCTLPPSRDELTKNQVSLSCAVK | | |
| | | | GFYPSDIAVEWESNGQPENNYKTTP | | |
| | | | PVLDSDGSFFLVSKLTVDKSRWQQG | | |
| | | | MVFSCSVMHEALHNHYTQKSLSLSP | | |
| | | | G | | |
| | | | (SEQ | | |
| | | | ID | | |
| | | | NO: 9) | | |
| AK487 | DNA584 | Knob: | DKTHTCPPCPAPELLGGPSVFLFPP | GSPG | VPLSLY |
| | | hFc(N297A)- | KPKDTLMISRTPEVTCVVVDVSHED | (SEQ ID | (SEQ ID |
| | | [VPLSLY]- | PEVKFNWYVDGVEVHNAKTKPREEQ | NO: 34) | NO: 28) |
| | | hIL2 | YASTYRVVSVLTVLHQDWLNGKEYK | | |
| | | (D20L, R38A, | CKVSNKALPAPIEKTISKAKGQPRE | | |
| | | F42A, Y45A, | PQVYTLPPCRDELTKNQVSLWCLVK | | |
| | | E62A, C125A) | GFYPSDIAVEWESNGQPENNYKTTP | | |
| | | | PVLDSDGSFFLYSKLTVDKSRWQQG | | |
| | | | NVFSCSVMHEALHNHYTQKSLSLSP | | |
| | | | G | | |
| | | | (SEQ | | |
| | | | ID | | |
| | | | NO: 12) | | |
| AK488 | DNA158 | Hole: hFc | DKTHTCPPCPAPELLGGPSVFLFPP | | |
| | | (N297A) | KPKDTLMISRTPEVTCVVVDVSHED | | |
| | | | PEVKFNWYVDGVEVHNAKTKPREEQ | | |
| | | | YASTYRVVSVLTVLHQDWLNGKEYK | | |
| | | | CKVSNKALPAPIEKTISKAKGQPRE | | |
| | | | PQVCTLPPSRDELTKNQVSLSCAVK | | |
| | | | GFYPSDIAVEWESNGQPENNYKTTP | | |
| | | | PVLDSDGSFFLVSKLTVDKSRWQQG | | |
| | | | MVFSCSVMHEALHNHYTQKSLSLSP | | |
| | | | G | | |
| | | | (SEQ | | |
| | | | ID | | |
| | | | NO: 9) | | |
| AK488 | DNA585 | Knob: | DKTHTCPPCPAPELLGGPSVFLFPP | GSPG | VPLSLY |
| | | hFc(N297A)- | KPKDTLMISRTPEVTCVVVDVSHED | (SEQ ID | (SEQ ID |
| | | [VPLSLY]- | PEVKFNWYVDGVEVHNAKTKPREEQ | NO: 34) | NO: 28) |
| | | hIL2 | YASTYRVVSVLTVLHQDWLNGKEYK | | |
| | | (H16Y, L18C, | CKVSNKALPAPIEKTISKAKGQPRE | | |
| | | R38A, | PQVYTLPPCRDELTKNQVSLWCLVK | | |
| | | F42A, Y45A, | GFYPSDIAVEWESNGQPENNYKTTP | | |
| | | E62A) | PVLDSDGSFFLYSKLTVDKSRWQQG | | |
| | | | NVFSCSVMHEALHNHYTQKSLSLSP | | |
| | | | G | | |
| | | | (SEQ | | |
| | | | ID | | |
| | | | NO: 12) | | |
| AK489 | DNA158 | Hole: hFc | DKTHTCPPCPAPELLGGPSVFLFPP | | |
| | | (N297A) | KPKDTLMISRTPEVTCVVVDVSHED | | |
| | | | PEVKFNWYVDGVEVHNAKTKPREEQ | | |
| | | | YASTYRVVSVLTVLHQDWLNGKEYK | | |
| | | | CKVSNKALPAPIEKTISKAKGQPRE | | |
| | | | PQVCTLPPSRDELTKNQVSLSCAVK | | |
| | | | GFYPSDIAVEWESNGQPENNYKTTP | | |
| | | | PVLDSDGSFFLVSKLTVDKSRWQQG | | |
| | | | MVFSCSVMHEALHNHYTQKSLSLSP | | |
| | | | G | | |
| | | | (SEQ | | |
| | | | ID | | |
| | | | NO: 9) | | |
| AK489 | DNA586 | Knob: | DKTHTCPPCPAPELLGGPSVFLFPP | GSPG | VPLSLY |
| | | hFc(N297A)- | KPKDTLMISRTPEVTCVVVDVSHED | (SEQ ID | (SEQ ID |
| | | [VPLSLY]- | PEVKFNWYVDGVEVHNAKTKPREEQ | NO: 34) | NO: 28) |
| | | hIL2 | YASTYRVVSVLTVLHQDWLNGKEYK | | |
| | | (H16E, L18C, | CKVSNKALPAPIEKTISKAKGQPRE | | |
| | | R38A, | PQVYTLPPCRDELTKNQVSLWCLVK | | |
| | | F42A, Y45A, | GFYPSDIAVEWESNGQPENNYKTTP | | |
| | | E62A) | PVLDSDGSFFLYSKLTVDKSRWQQG | | |
| | | | NVFSCSVMHEALHNHYTQKSLSLSP | | |
| | | | G | | |
| | | | (SEQ | | |
| | | | ID | | |
| | | | NO: 12) | | |
| Ak490 | DNA158 | Hole: hFc | DKTHTCPPCPAPELLGGPSVFLFPP | | |
| | | (N297A) | KPKDTLMISRTPEVTCVVVDVSHED | | |
| | | | PEVKFNWYVDGVEVHNAKTKPREEQ | | |
| | | | YASTYRVVSVLTVLHQDWLNGKEYK | | |
| | | | CKVSNKALPAPIEKTISKAKGQPRE | | |
| | | | PQVCTLPPSRDELTKNQVSLSCAVK | | |
| | | | GFYPSDIAVEWESNGQPENNYKTTP | | |
| | | | PVLDSDGSFFLVSKLTVDKSRWQQG | | |
| | | | MVFSCSVMHEALHNHYTQKSLSLSP | | |
| | | | G | | |
| | | | (SEQ | | |
| | | | ID | | |
| | | | NO: 9) | | |
| Ak490 | DNA587 | Knob: | DKTHTCPPCPAPELLGGPSVFLFPP | GSPG | VPLSLY |
| | | hFc(N297A)- | KPKDTLMISRTPEVTCVVVDVSHED | (SEQ ID | (SEQ ID |
| | | [VPLSLY]- | PEVKFNWYVDGVEVHNAKTKPREEQ | NO: 34) | NO: 28) |
| | | hIL2 | YASTYRVVSVLTVLHQDWLNGKEYK | | |
| | | (L18C, d20L, | CKVSNKALPAPIEKTISKAKGQPRE | | |
| | | R38A, | PQVYTLPPCRDELTKNQVSLWCLVK | | |
| | | F42A, Y45A, | GFYPSDIAVEWESNGQPENNYKTTP | | |
| | | E62A) | PVLDSDGSFFLYSKLTVDKSRWQQG | | |
| | | | NVFSCSVMHEALHNHYTQKSLSLSP | | |
| | | | G | | |
| | | | (SEQ | | |
| | | | ID | | |
| | | | NO: 12) | | |
| Ak491 | DNA158 | Hole: hFc | DKTHTCPPCPAPELLGGPSVFLFPP | | |
| | | (N297A) | KPKDTLMISRTPEVTCVVVDVSHED | | |
| | | | PEVKFNWYVDGVEVHNAKTKPREEQ | | |
| | | | YASTYRVVSVLTVLHQDWLNGKEYK | | |
| | | | CKVSNKALPAPIEKTISKAKGQPRE | | |
| | | | PQVCTLPPSRDELTKNQVSLSCAVK | | |
| | | | GFYPSDIAVEWESNGQPENNYKTTP | | |
| | | | PVLDSDGSFFLVSKLTVDKSRWQQG | | |
| | | | MVFSCSVMHEALHNHYTQKSLSLSP | | |
| | | | G | | |
| | | | (SEQ | | |
| | | | ID | | |
| | | | NO: 9) | | |
| Ak491 | DNA588 | Knob: | DKTHTCPPCPAPELLGGPSVFLFPP | GSPG | VPLSLY |
| | | hFc(N297A)- | KPKDTLMISRTPEVTCVVVDVSHED | (SEQ ID | (SEQ ID |
| | | [VPLSLY]- | PEVKFNWYVDGVEVHNAKTKPREEQ | NO: 34) | NO: 28) |
| | | hIL2 | YASTYRVVSVLTVLHQDWLNGKEYK | | |
| | | (H16Y, L18C, | CKVSNKALPAPIEKTISKAKGQPRE | | |
| | | D20L, R38A, | PQVYTLPPCRDELTKNQVSLWCLVK | | |
| | | F42A, Y45A, | GFYPSDIAVEWESNGQPENNYKTTP | | |
| | | E62A) | PVLDSDGSFFLYSKLTVDKSRWQQG | | |
| | | | NVFSCSVMHEALHNHYTQKSLSLSP | | |
| | | | G | | |
| | | | (SEQ | | |
| | | | ID | | |
| | | | NO: 12) | | |
| Ak492 | DNA158 | Hole: hFc | DKTHTCPPCPAPELLGGPSVFLFPP | | |
| | | (N297A) | KPKDTLMISRTPEVTCVVVDVSHED | | |
| | | | PEVKFNWYVDGVEVHNAKTKPREEQ | | |
| | | | YASTYRVVSVLTVLHQDWLNGKEYK | | |
| | | | CKVSNKALPAPIEKTISKAKGQPRE | | |
| | | | PQVCTLPPSRDELTKNQVSLSCAVK | | |
| | | | GFYPSDIAVEWESNGQPENNYKTTP | | |
| | | | PVLDSDGSFFLVSKLTVDKSRWQQG | | |
| | | | MVFSCSVMHEALHNHYTQKSLSLSP | | |
| | | | G | | |
| | | | (SEQ | | |
| | | | ID | | |
| | | | NO: 9) | | |
| Ak492 | DNA589 | Knob: | DKTHTCPPCPAPELLGGPSVFLFPP | GSPG | VPLSLY |
| | | hFc(N297A)- | KPKDTLMISRTPEVTCVVVDVSHED | (SEQ ID | (SEQ ID |
| | | [VPLSLY]- | PEVKFNWYVDGVEVHNAKTKPREEQ | NO: 34) | NO: 28) |
| | | hIL2 | YASTYRVVSVLTVLHQDWLNGKEYK | | |
| | | (H16E, L18C, | CKVSNKALPAPIEKTISKAKGQPRE | | |
| | | D20L, R38A, | PQVYTLPPCRDELTKNQVSLWCLVK | | |
| | | F42A, Y45A, | GFYPSDIAVEWESNGQPENNYKTTP | | |
| | | E62A) | PVLDSDGSFFLYSKLTVDKSRWQQG | | |
| | | | NVFSCSVMHEALHNHYTQKSLSLSP | | |
| | | | G | | |
| | | | (SEQ | | |
| | | | ID | | |
| | | | NO: 12) | | |
| AK493 | DNA187 | Hole: hFc | DKTHTCPPCPAPELLGGPSVFLFPP | | AVNGTSQFTCFYNSRANISCVWSQD |
| | | (N297A)- | KPKDTLMISRTPEVTCVVVDVSHED | | GALQDTSCQVHAWPDRRRWNQTCEL |
| | | hCD122 | PEVKFNWYVDGVEVHNAKTKPREEQ | | LFVSQASWACNLILGAPDSQKLTTV |
| | | | YASTYRVVSVLTVLHQDWLNGKEYK | | DIVTLRVLCREGVRWRVMAIQDFKP |
| | | | CKVSNKALPAPIEKTISKAKGQPRE | | FENLRLMAPISLQVVHVETHRCNIS |
| | | | PQVCTLPPSRDELTKNQVSLSCAVK | | WEISQASHYFERHLEFEARTLSPGH |
| | | | GFYPSDIAVEWESNGQPENNYKTTP | | TWEEAPLLTLKQKQEWICLETLTPD |
| | | | PVLDSDGSFFLVSKLTVDKSRWQQG | | TQYEFQVRVKPLQGEFTTWSPWSQP |
| | | | MVFSCSVMHEALHNHYTQKSLSLSP | | LAFRTKPAALGKD |
| | | | G | | (SEQ ID NO: 4) |
| | | | (SEQ | | |
| | | | ID | | |
| | | | NO: 9) | | |
| Ak493 | DNA581 | Knob: | DKTHTCPPCPAPELLGGPSVFLFPP | GSPG | VPLSLY |
| | | hFc(N297A)- | KPKDTLMISRTPEVTCVVVDVSHED | (SEQ ID | (SEQ ID |
| | | [VPLSLY]- | PEVKFNWYVDGVEVHNAKTKPREEQ | NO: 34) | NO: 28) |
| | | hIL2 | YASTYRVVSVLTVLHQDWLNGKEYK | | |
| | | (L18C, | CKVSNKALPAPIEKTISKAKGQPRE | | |
| | | R38A, | PQVYTLPPCRDELTKNQVSLWCLVK | | |
| | | F42A, Y45A, | GFYPSDIAVEWESNGQPENNYKTTP | | |
| | | E62A) | PVLDSDGSFFLYSKLTVDKSRWQQG | | |
| | | | NVFSCSVMHEALHNHYTQKSLSLSP | | |
| | | | G | | |
| | | | (SEQ | | |
| | | | ID | | |
| | | | NO: 12) | | |
| AK494 | DNA187 | Hole: hFc | DKTHTCPPCPAPELLGGPSVFLFPP | | AVNGTSQFTCFYNSRANISCVWSQD |
| | | (N297A)- | KPKDTLMISRTPEVTCVVVDVSHED | | GALQDTSCQVHAWPDRRRWNQTCEL |
| | | hCD122 | PEVKFNWYVDGVEVHNAKTKPREEQ | | LFVSQASWACNLILGAPDSQKLTTV |
| | | | YASTYRVVSVLTVLHQDWLNGKEYK | | DIVTLRVLCREGVRWRVMAIQDFKP |
| | | | CKVSNKALPAPIEKTISKAKGQPRE | | FENLRLMAPISLQVVHVETHRCNIS |
| | | | PQVCTLPPSRDELTKNQVSLSCAVK | | WEISQASHYFERHLEFEARTLSPGH |
| | | | GFYPSDIAVEWESNGQPENNYKTTP | | TWEEAPLLTLKQKQEWICLETLTPD |
| | | | PVLDSDGSFFLVSKLTVDKSRWQQG | | TQYEFQVRVKPLQGEFTTWSPWSQP |
| | | | MVFSCSVMHEALHNHYTQKSLSLSP | | LAFRTKPAALGKD |
| | | | G | | (SEQ ID NO: 4) |
| | | | (SEQ | | |
| | | | ID | | |
| | | | NO: 9) | | |
| AK494 | DNA582 | Knob: | DKTHTCPPCPAPELLGGPSVFLFPP | GSPG | VPLSLY |
| | | hFc(N297A)- | KPKDTLMISRTPEVTCVVVDVSHED | (SEQ ID | (SEQ ID |
| | | [VPLSLY]- | PEVKFNWYVDGVEVHNAKTKPREEQ | NO: 34) | NO: 28) |
| | | hIL2 | YASTYRVVSVLTVLHQDWLNGKEYK | | |
| | | (H16Y, | CKVSNKALPAPIEKTISKAKGQPRE | | |
| | | R38A, | PQVYTLPPCRDELTKNQVSLWCLVK | | |
| | | F42A, Y45A, | GFYPSDIAVEWESNGQPENNYKTTP | | |
| | | E62A, C125A) | PVLDSDGSFFLYSKLTVDKSRWQQG | | |
| | | | NVFSCSVMHEALHNHYTQKSLSLSP | | |
| | | | G | | |
| | | | (SEQ | | |
| | | | ID | | |
| | | | NO: 12) | | |
| AK495 | DNA187 | Hole: hFc | DKTHTCPPCPAPELLGGPSVFLFPP | | AVNGTSQFTCFYNSRANISCVWSQD |
| | | (N297A)- | KPKDTLMISRTPEVTCVVVDVSHED | | GALQDTSCQVHAWPDRRRWNQTCEL |
| | | hCD122 | PEVKFNWYVDGVEVHNAKTKPREEQ | | LFVSQASWACNLILGAPDSQKLTTV |
| | | | YASTYRVVSVLTVLHQDWLNGKEYK | | DIVTLRVLCREGVRWRVMAIQDFKP |
| | | | CKVSNKALPAPIEKTISKAKGQPRE | | FENLRLMAPISLQVVHVETHRCNIS |
| | | | PQVCTLPPSRDELTKNQVSLSCAVK | | WEISQASHYFERHLEFEARTLSPGH |
| | | | GFYPSDIAVEWESNGQPENNYKTTP | | TWEEAPLLTLKQKQEWICLETLTPD |
| | | | PVLDSDGSFFLVSKLTVDKSRWQQG | | TQYEFQVRVKPLQGEFTTWSPWSQP |
| | | | MVFSCSVMHEALHNHYTQKSLSLSP | | LAFRTKPAALGKD |
| | | | G | | (SEQ ID NO: 4) |
| | | | (SEQ | | |
| | | | ID | | |
| | | | NO: 9) | | |
| AK495 | DNA583 | Knob: | DKTHTCPPCPAPELLGGPSVFLFPP | GSPG | VPLSLY |
| | | hFc(N297A)- | KPKDTLMISRTPEVTCVVVDVSHED | (SEQ ID | (SEQ ID |
| | | [VPLSLY]- | PEVKFNWYVDGVEVHNAKTKPREEQ | NO: 34) | NO: 28) |
| | | hIL2 | YASTYRVVSVLTVLHQDWLNGKEYK | | |
| | | (H16E, | CKVSNKALPAPIEKTISKAKGQPRE | | |
| | | R38A, | PQVYTLPPCRDELTKNQVSLWCLVK | | |
| | | F42A, Y45A, | GFYPSDIAVEWESNGQPENNYKTTP | | |
| | | E62A, C125A) | PVLDSDGSFFLYSKLTVDKSRWQQG | | |
| | | | NVFSCSVMHEALHNHYTQKSLSLSP | | |
| | | | G | | |
| | | | (SEQ | | |
| | | | ID | | |
| | | | NO: 12) | | |
| AK496 | DNA187 | Hole: hFc | DKTHTCPPCPAPELLGGPSVFLFPP | PGSGS | AVNGTSQFTCFYNSRANISCVWSQD |
| | | (N297A)- | KPKDTLMISRTPEVTCVVVDVSHED | (SEQ ID | GALQDTSCQVHAWPDRRRWNQTCEL |
| | | hCD122 | PEVKFNWYVDGVEVHNAKTKPREEQ | NO: 14) | LFVSQASWACNLILGAPDSQKLTTV |
| | | | YASTYRVVSVLTVLHQDWLNGKEYK | | DIVTLRVLCREGVRWRVMAIQDFKP |
| | | | CKVSNKALPAPIEKTISKAKGQPRE | | FENLRLMAPISLQVVHVETHRCNIS |
| | | | PQVCTLPPSRDELTKNQVSLSCAVK | | WEISQASHYFERHLEFEARTLSPGH |
| | | | GFYPSDIAVEWESNGQPENNYKTTP | | TWEEAPLLTLKQKQEWICLETLTPD |
| | | | PVLDSDGSFFLVSKLTVDKSRWQQG | | TQYEFQVRVKPLQGEFTTWSPWSQP |
| | | | MVFSCSVMHEALHNHYTQKSLSLSP | | LAFRTKPAALGKD |
| | | | G | | (SEQ ID NO: 4) |
| | | | (SEQ | | |
| | | | ID | | |
| | | | NO: 9) | | |
| AK496 | DNA584 | Knob: | DKTHTCPPCPAPELLGGPSVFLFPP | GSPG | VPLSLY |
| | | hFc(N297A)- | KPKDTLMISRTPEVTCVVVDVSHED | (SEQ ID | (SEQ ID |
| | | [VPLSLY]- | PEVKFNWYVDGVEVHNAKTKPREEQ | NO: 34) | NO: 28) |
| | | hIL2 | YASTYRVVSVLTVLHQDWLNGKEYK | | |
| | | (D20L, R38A, | CKVSNKALPAPIEKTISKAKGQPRE | | |
| | | F42A, Y45A, | PQVYTLPPCRDELTKNQVSLWCLVK | | |
| | | E62A, C125A) | GFYPSDIAVEWESNGQPENNYKTTP | | |
| | | | PVLDSDGSFFLYSKLTVDKSRWQQG | | |
| | | | NVFSCSVMHEALHNHYTQKSLSLSP | | |
| | | | G | | |
| | | | (SEQ | | |
| | | | ID | | |
| | | | NO: 12) | | |
| AK497 | DNA187 | Hole: hFc | DKTHTCPPCPAPELLGGPSVFLFPP | PGSGS | AVNGTSQFTCFYNSRANISCVWSQD |
| | | (N297A)- | KPKDTLMISRTPEVTCVVVDVSHED | (SEQ ID | GALQDTSCQVHAWPDRRRWNQTCEL |
| | | hCD122 | PEVKFNWYVDGVEVHNAKTKPREEQ | NO: 14) | LFVSQASWACNLILGAPDSQKLTTV |
| | | | YASTYRVVSVLTVLHQDWLNGKEYK | | DIVTLRVLCREGVRWRVMAIQDFKP |
| | | | CKVSNKALPAPIEKTISKAKGQPRE | | FENLRLMAPISLQVVHVETHRCNIS |
| | | | PQVCTLPPSRDELTKNQVSLSCAVK | | WEISQASHYFERHLEFEARTLSPGH |
| | | | GFYPSDIAVEWESNGQPENNYKTTP | | TWEEAPLLTLKQKQEWICLETLTPD |
| | | | PVLDSDGSFFLVSKLTVDKSRWQQG | | TQYEFQVRVKPLQGEFTTWSPWSQP |
| | | | MVFSCSVMHEALHNHYTQKSLSLSP | | LAFRTKPAALGKD |
| | | | G | | (SEQ ID NO: 4) |
| | | | (SEQ | | |
| | | | ID | | |
| | | | NO: 9) | | |
| AK497 | DNA585 | Knob: | DKTHTCPPCPAPELLGGPSVFLFPP | GSPG | VPLSLY |
| | | hFc(N297A)- | KPKDTLMISRTPEVTCVVVDVSHED | (SEQ ID | (SEQ ID |
| | | [VPLSLY]- | PEVKFNWYVDGVEVHNAKTKPREEQ | NO: 34) | NO: 28) |
| | | hIL2 | YASTYRVVSVLTVLHQDWLNGKEYK | | |
| | | (H16Y, L18C, | CKVSNKALPAPIEKTISKAKGQPRE | | |
| | | R38A, | PQVYTLPPCRDELTKNQVSLWCLVK | | |
| | | F42A, Y45A, | GFYPSDIAVEWESNGQPENNYKTTP | | |
| | | E62A) | PVLDSDGSFFLYSKLTVDKSRWQQG | | |
| | | | NVFSCSVMHEALHNHYTQKSLSLSP | | |
| | | | G | | |
| | | | (SEQ | | |
| | | | ID | | |
| | | | NO: 12) | | |
| AK498 | DNA187 | Hole: hFc | DKTHTCPPCPAPELLGGPSVFLFPP | PGSGS | AVNGTSQFTCFYNSRANISCVWSQD |
| | | (N297A)- | KPKDTLMISRTPEVTCVVVDVSHED | (SEQ ID | GALQDTSCQVHAWPDRRRWNQTCEL |
| | | hCD122 | PEVKFNWYVDGVEVHNAKTKPREEQ | NO: 14) | LFVSQASWACNLILGAPDSQKLTTV |
| | | | YASTYRVVSVLTVLHQDWLNGKEYK | | DIVTLRVLCREGVRWRVMAIQDFKP |
| | | | CKVSNKALPAPIEKTISKAKGQPRE | | FENLRLMAPISLQVVHVETHRCNIS |
| | | | PQVCTLPPSRDELTKNQVSLSCAVK | | WEISQASHYFERHLEFEARTLSPGH |
| | | | GFYPSDIAVEWESNGQPENNYKTTP | | TWEEAPLLTLKQKQEWICLETLTPD |
| | | | PVLDSDGSFFLVSKLTVDKSRWQQG | | TQYEFQVRVKPLQGEFTTWSPWSQP |
| | | | MVFSCSVMHEALHNHYTQKSLSLSP | | LAFRTKPAALGKD |
| | | | G | | (SEQ ID NO: 4) |
| | | | (SEQ | | |
| | | | ID | | |
| | | | NO: 9) | | |
| AK498 | DNA586 | Knob: | DKTHTCPPCPAPELLGGPSVFLFPP | GSPG | VPLSLY |
| | | hFc(N297A)- | KPKDTLMISRTPEVTCVVVDVSHED | (SEQ ID | (SEQ ID |
| | | [VPLSLY]- | PEVKFNWYVDGVEVHNAKTKPREEQ | NO: 34) | NO: 28) |
| | | hIL2 | YASTYRVVSVLTVLHQDWLNGKEYK | | |
| | | (H16E, L18C, | CKVSNKALPAPIEKTISKAKGQPRE | | |
| | | R38A, | PQVYTLPPCRDELTKNQVSLWCLVK | | |
| | | F42A, Y45A, | GFYPSDIAVEWESNGQPENNYKTTP | | |
| | | E62A) | PVLDSDGSFFLYSKLTVDKSRWQQG | | |
| | | | NVFSCSVMHEALHNHYTQKSLSLSP | | |
| | | | G | | |
| | | | (SEQ | | |
| | | | ID | | |
| | | | NO: 12) | | |
| AK499 | DNA187 | Hole: hFc | DKTHTCPPCPAPELLGGPSVFLFPP | PGSGS | AVNGTSQFTCFYNSRANISCVWSQD |
| | | (N297A)- | KPKDTLMISRTPEVTCVVVDVSHED | (SEQ ID | GALQDTSCQVHAWPDRRRWNQTCEL |
| | | hCD122 | PEVKFNWYVDGVEVHNAKTKPREEQ | NO: 14) | LFVSQASWACNLILGAPDSQKLTTV |
| | | | YASTYRVVSVLTVLHQDWLNGKEYK | | DIVTLRVLCREGVRWRVMAIQDFKP |
| | | | CKVSNKALPAPIEKTISKAKGQPRE | | FENLRLMAPISLQVVHVETHRCNIS |
| | | | PQVCTLPPSRDELTKNQVSLSCAVK | | WEISQASHYFERHLEFEARTLSPGH |
| | | | GFYPSDIAVEWESNGQPENNYKTTP | | TWEEAPLLTLKQKQEWICLETLTPD |
| | | | PVLDSDGSFFLVSKLTVDKSRWQQG | | TQYEFQVRVKPLQGEFTTWSPWSQP |
| | | | MVFSCSVMHEALHNHYTQKSLSLSP | | LAFRTKPAALGKD |
| | | | G | | (SEQ ID NO: 4) |
| | | | (SEQ | | |
| | | | ID | | |
| | | | NO: 9) | | |
| AK499 | DNA587 | Knob: | DKTHTCPPCPAPELLGGPSVFLFPP | GSPG | VPLSLY |
| | | hFc(N297A)- | KPKDTLMISRTPEVTCVVVDVSHED | (SEQ ID | (SEQ ID |
| | | [VPLSLY]- | PEVKFNWYVDGVEVHNAKTKPREEQ | NO: 34) | NO: 28) |
| | | hIL2 | YASTYRVVSVLTVLHQDWLNGKEYK | | |
| | | (L18C, d20L, | CKVSNKALPAPIEKTISKAKGQPRE | | |
| | | R38A, | PQVYTLPPCRDELTKNQVSLWCLVK | | |
| | | F42A, Y45A, | GFYPSDIAVEWESNGQPENNYKTTP | | |
| | | E62A) | PVLDSDGSFFLYSKLTVDKSRWQQG | | |
| | | | NVFSCSVMHEALHNHYTQKSLSLSP | | |
| | | | G | | |
| | | | (SEQ | | |
| | | | ID | | |
| | | | NO: 12) | | |
| AK500 | DNA187 | Hole: hFc | DKTHTCPPCPAPELLGGPSVFLFPP | PGSGS | AVNGTSQFTCFYNSRANISCVWSQD |
| | | (N297A)- | KPKDTLMISRTPEVTCVVVDVSHED | (SEQ ID | GALQDTSCQVHAWPDRRRWNQTCEL |
| | | hCD122 | PEVKFNWYVDGVEVHNAKTKPREEQ | NO: 14) | LFVSQASWACNLILGAPDSQKLTTV |
| | | | YASTYRVVSVLTVLHQDWLNGKEYK | | DIVTLRVLCREGVRWRVMAIQDFKP |
| | | | CKVSNKALPAPIEKTISKAKGQPRE | | FENLRLMAPISLQVVHVETHRCNIS |
| | | | PQVCTLPPSRDELTKNQVSLSCAVK | | WEISQASHYFERHLEFEARTLSPGH |
| | | | GFYPSDIAVEWESNGQPENNYKTTP | | TWEEAPLLTLKQKQEWICLETLTPD |
| | | | PVLDSDGSFFLVSKLTVDKSRWQQG | | TQYEFQVRVKPLQGEFTTWSPWSQP |
| | | | MVFSCSVMHEALHNHYTQKSLSLSP | | LAFRTKPAALGKD |
| | | | G | | (SEQ ID NO: 4) |
| | | | (SEQ | | |
| | | | ID | | |
| | | | NO: 9) | | |
| AK500 | DNA588 | Knob: | DKTHTCPPCPAPELLGGPSVFLFPP | GSPG | VPLSLY |
| | | hFc(N297A)- | KPKDTLMISRTPEVTCVVVDVSHED | (SEQ ID | (SEQ ID |
| | | [VPLSLY]- | PEVKFNWYVDGVEVHNAKTKPREEQ | NO: 34) | NO: 28) |
| | | hIL2 | YASTYRVVSVLTVLHQDWLNGKEYK | | |
| | | (H16Y, L18C, | CKVSNKALPAPIEKTISKAKGQPRE | | |
| | | D20L, R38A, | PQVYTLPPCRDELTKNQVSLWCLVK | | |
| | | F42A, Y45A, | GFYPSDIAVEWESNGQPENNYKTTP | | |
| | | E62A) | PVLDSDGSFFLYSKLTVDKSRWQQG | | |
| | | | NVFSCSVMHEALHNHYTQKSLSLSP | | |
| | | | G | | |
| | | | (SEQ | | |
| | | | ID | | |
| | | | NO: 12) | | |
| AK501 | DNA187 | Hole: hFc | DKTHTCPPCPAPELLGGPSVFLFPP | PGSGS | AVNGTSQFTCFYNSRANISCVWSQD |
| | | (N297A)- | KPKDTLMISRTPEVTCVVVDVSHED | (SEQ ID | GALQDTSCQVHA |
| | | hCD122 | PEVKFNWYVDGVEVHNAKTKPREEQ | NO: 14) | WPDRRRWNQTCELLFVSQASWACNL |
| | | | YASTYRVVSVLTVLHQDWLNGKEYK | | ILGAPDSQKLTT |
| | | | CKVSNKALPAPIEKTISKAKGQPRE | | VDIVTLRVLCREGVRWRVMAIQDFK |
| | | | PQVCTLPPSRDELTKNQVSLSCAVK | | PFENLRLMAPIS |
| | | | GFYPSDIAVEWESNGQPENNYKTTP | | LQVVHVETHRCNISWEISQASHYFE |
| | | | PVLDSDGSFFLVSKLTVDKSRWQQG | | RHLEFEARTLSP |
| | | | MVFSCSVMHEALHNHYTQKSLSLSP | | GHTWEEAPLLTLKQKQEWICLETLT |
| | | | G | | PDTQYEFQVRVK |
| | | | (SEQ | | PLQGEFTTWSPWSQPLAFRTKPAAL |
| | | | ID | | GKD |
| | | | NO: 9) | | (SEQ ID |
| | | | | | NO: 4) |
| AK501 | DNA589 | Knob: | DKTHTCPPCPAPELLGGPSVFLFPP | GSPG | VPLSLY |
| | | hFc(N297A)- | KPKDTLMISRTPEVTCVVVDVSHED | (SEQ ID | (SEQ ID |
| | | [VPLSLY]- | PEVKFNWYVDGVEVHNAKTKPREEQ | NO: 34) | NO: 28) |
| | | hIL2 | YASTYRVVSVLTVLHQDWLNGKEYK | | |
| | | (H163, L18C, | CKVSNKALPAPIEKTISKAKGQPRE | | |
| | | D20L, R38A, | PQVYTLPPCRDELTKNQVSLWCLVK | | |
| | | F42A, Y45A, | GFYPSDIAVEWESNGQPENNYKTTP | | |
| | | E62A) | PVLDSDGSFFLYSKLTVDKSRWQQG | | |
| | | | NVFSCSVMHEALHNHYTQKSLSLSP | | |
| | | | G | | |
| | | | (SEQ | | |
| | | | ID | | |
| | | | NO: 12) | | |
| AK502 | DNA543 | Hole: hFc | DKTHTCPPCPAPELLGGPSVFLFPP | GPPSG | VPLSLY |
| | | (N297A)- | KPKDTLMISRTPEVTCVVVDVSHED | SSPG | (SEQ ID |
| | | [VPLSLY]- | PEVKFNWYVDGVEVHNAKTKPREEQ | (SEQ ID | NO: 28) |
| | | hCD122 | YASTYRVVSVLTVLHQDWLNGKEYK | NO: 36) | |
| | | | CKVSNKALPAPIEKTISKAKGQPRE | | |
| | | | PQVCTLPPSRDELTKNQVSLSCAVK | | |
| | | | GFYPSDIAVEWESNGQPENNYKTTP | | |
| | | | PVLDSDGSFFLVSKLTVDKSRWQQG | | |
| | | | MVFSCSVMHEALHNHYTQKSLSLSP | | |
| | | | G | | |
| | | | (SEQ | | |
| | | | ID | | |
| | | | NO: 9) | | |
| AK502 | DNA577 | Knob: | DKTHTCPPCPAPQLLGGPSVFLFPP | GSSPPGGGSSGG | APTSSSTKKTQLQLEHLLLDLQMIL |
| | | hFc(N297A, | KPKDTLMASRTPEVTCVVVDVSHED | GSGP | NGINNYKNPKLTAMLTAKFAMPKKA |
| | | I253A)- | PEVKFNWYVDGVEVHNAKTKPREEQ | (SEQ ID | TELKHLQCLEEALKPLEEVLNLAQS |
| | | hIL2 | YASTYRVVSVLTVLHQDWLNGKEYK | NO: 23) | KNFHLRPRDLISNINVIVLELKGSE |
| | | (R38A, | CKVSNKALPAPIEKTISKAKGQPRE | | TTFMCEYADETATIVEFLNRWITFA |
| | | F42A, Y45A, | PQVYTLPPCRDELTKNQVSLWCLVK | | QSIISTLT |
| | | E62A, C125A) | GFYPSDIAVEWESNGQPEN | | (SEQ ID |
| | | | NIYKTTPPVLDSDGSFFIYSKLTVD | | NO: 3) |
| | | | KSRWQQGNVFSCSVMHEALHNHYTQ | | |
| | | | KSLSLSPG | | |
| | | | (SEQ | | |
| | | | ID | | |
| | | | NO: 13) | | |
| AK503 | DNA255 | Knob: | DKTHTCPPCPAPELLGGPSVFLFPP | GSSPPGGGSSGG | APTSSSTKKTQLQLEHLLLDLQMIL |
| | | hFc(N297A)- | KPKDTLMISRTPEVTCVVVDVSHED | GSGP | NGINNYKNPKLTAMLTAKFAMPKKA |
| | | hIL2 | PEVKFNWYVDGVEVHNAKTKPREEQ | (SEQ ID | TELKHLQCLEEALKPLEEVLNLAQS |
| | | (R38A, | YASTYRVVSVLTVLHQDWLNGKEYK | NO: 23) | KNFHLRPRDLISNINVIVLELKGSE |
| | | F42A, Y45A, | CKVSNKALPAPIEKTISKAKGQPRE | | TTFMCEYADETATIVEFLNRWITFA |
| | | E62A, C125A) | PQVYTLPPCRDELTKNQVSLWCLVK | | QSIISTLT |
| | | | GFYPSDIAVEWESNGQPENNYKTTP | | (SEQ ID |
| | | | PVLDSDGSFFLYSKLTVDKSRWQQG | | NO: 3) |
| | | | NVFSCSVMHEALHNHYTQKSLSLSP | | |
| | | | G | | |
| | | | (SEQ | | |
| | | | ID | | |
| | | | NO: 12) | | |
| AK503 | DNA606 | Knob: | DKTHTCPPCPAPELLGGPSVFLFPP | GPPSGSSP | RAAAVKSP |
| | | hFc(N297A)- | KPKDTLMISRTPEVTCVVVDVSHED | (SEQ ID | (SEQ ID NO: 27) |
| | | [RAAAVKSP]- | PEVKFNWYVDGVEVHNAKTKPREEQ | NO: 37) | |
| | | hCD122 | YASTYRVVSVLTVLHQDWLNGKEYK | | |
| | | | CKVSNKALPAPIEKTISKAKGQPRE | | |
| | | | PQVCTLPPSRDELTKNQVSLSCAVK | | |
| | | | GFYPSDIAVEWESNGQPENNYKTTP | | |
| | | | PVLDSDGSFFLVSKLTVDKSRWQQG | | |
| | | | MVFSCSVMHEALHNHYTQKSLSLSP | | |
| | | | G | | |
| | | | (SEQ | | |
| | | | ID | | |
| | | | NO: 9) | | |
| AK504 | DNA603 | Hole: | ESKYGPPCPPCPAPEFLGGPSVFLF | PGSGS | AVNGTSQFTCFYNSRANISCVWSQD |
| | | hFcIgG4- | PPKPKDTLMISRTPEVTCVVVDVSQ | (SEQ ID | GALQDTSCQVHAWPDRRRWNQTCEL |
| | | hCD122 | EDPEVQFNWYVDGVEVHNAKTKPRE | NO: 14) | LFVSQASWACNLILGAPDSQKLTTV |
| | | | EQFNSTYRVVSVLTVLHQDWLNGKE | | DIVTLRVLCREGVRWRVMAIQDFKP |
| | | | YKCKVSNKGLPSSIEKTISKAKGQP | | FENLRLMAPISLQVVHVETHRCNIS |
| | | | REPQVCTLPPSQEEMTKNQVSLSCA | | WEISQASHYFERHLEFEARTLSPGH |
| | | | VKGFYPSDIAVEWESNGQPENNYKT | | TWEEAPLLTLKQKQEWICLETLTPD |
| | | | TPPVLDSDGSFFLYSRLTVDKSRWQ | | TQYEFQVRVKPLQGEFTTWSPWSQP |
| | | | EGNVFSCSVMHEALHNHYTQKSLSL | | LAFRTKPAALGKD |
| | | | SLG | | (SEQ ID NO: 4) |
| | | | (SEQ | | |
| | | | ID | | |
| | | | NO: 295) | | |
| AK504 | DNA605 | Knob: | ESKYGPPCPPCPAPEFLGGPSVFLF | GSPG | VPLSLY |
| | | hFc(N297A)- | PPKPKDTLMISRTPEVTCVVVDVSQ | (SEQ ID | (SEQ ID |
| | | [VPLSLY]- | EDPEVQFNWYVDGVEVHNAKTKPRE | NO: 34) | NO: 28) |
| | | hIL2 | EQFNSTYRVVSVLTVLHQDWLNGKE | | |
| | | (R38A, | YKCKVSNKGLPSSIEKTISKAKGQP | | |
| | | F42A, Y45A, | REPQVYTLPPSQEEMTKNQVSLSWC | | |
| | | E62A, | LVKGFYPSDIAVEWESNGQPENNYK | | |
| | | C125A) | TTPPVLDSDGSFFLYSRLTVDKSRW | | |
| | | | QEGNVFSCSVMHEALHNHYTQKSLS | | |
| | | | LSLG | | |
| | | | (SEQ | | |
| | | | ID | | |
| | | | NO: 296) | | |
| AK505 | DNA603 | Hole: | ESKYGPPCPPCPAPEFLGGPSVFLF | PGSGS | AVNGTSQFTCFYNSRANISCVWSQD |
| | | hFcIgG4- | PPKPKDTLMISRTPEVTCVVVDVSQ | (SEQ ID | GALQDTSCQVHAWPDRRRWNQTCEL |
| | | hCD122 | EDPEVQFNWYVDGVEVHNAKTKPRE | NO: 14) | LFVSQASWACNLILGAPDSQKLTTV |
| | | | EQFNSTYRVVSVLTVLHQDWLNGKE | | DIVTLRVLCREGVRWRVMAIQDFKP |
| | | | YKCKVSNKGLPSSIEKTISKAKGQP | | FENLRLMAPISLQVVHVETHRCNIS |
| | | | REPQVCTLPPSQEEMTKNQVSLSCA | | WEISQASHYFERHLEFEARTLSPGH |
| | | | VKGFYPSDIAVEWESNGQPENNYKT | | TWEEAPLLTLKQKQEWICLETLTPD |
| | | | TPPVLDSDGSFFLYSRLTVDKSRWQ | | TQYEFQVRVKPLQGEFTTWSPWSQP |
| | | | EGNVFSCSVMHEALHNHYTQKSLSL | | LAFRTKPAALGKD |
| | | | SLG | | (SEQ ID |
| | | | (SEQ | | NO: 4) |
| | | | ID | | |
| | | | NO: 295) | | |
| AK505 | DNA604 | Knob: | ESKYGPPCPPCPAPEFLGGPSVFLF | GSSPPGGGSSGG | APTSSSTKKTQLQLEHLLLDLQMIL |
| | | IgG4 | PPKPKDTLMISRTPEVTCVVVDVSQ | GSGP | NGINNYKNPKLTAMLTAKFAMPKKA |
| | | hFc- | EDPEVQFNWYVDGVEVHNAKTKPRE | (SEQ ID | TELKHLQCLEEALKPLEEVLNLAQS |
| | | hIL2(R38A, | EQFNSTYRVVSVLTVLHQDWLNGKE | NO: 23) | KNFHLRPRDLISNINVIVLELKGSE |
| | | F42A, Y45A, | YKCKVSNKGLPSSIEKTISKAKGQP | | TTFMCEYADETATIVEFLNRWITFA |
| | | E62A, C125A) | REPQVYTLPPSQEEMTKNQVSLSWC | | QSIISTLT |
| | | | LVKGFYPSDIAVEWESNGQPENNYK | | (SEQ ID |
| | | | TTPPVLDSDGSFFLYSRLTVDKSRW | | NO: 3) |
| | | | QEGNVFSCSVMHEALHNHYTQKSLS | | |
| | | | LSLG | | |
| | | | (SEQ | | |
| | | | ID | | |
| | | | NO: 296) | | |
| AK508 | DNA577 | Knob: | DKTHTCPPCPAPQLLGGPSVFLFPP | GSSPPG | APTSSSTKKTQLQLEHLLLDLQMIL |
| | | hFc(N297A, | KPKDTLMASRTPEVTCVVVDVSHED | GGSSGG | NGINNYKNPKLTAMLTAKFAMPKKA |
| | | I253A)- | PEVKFNWYVDGVEVHNAKTKPREEQ | GSGP | TELKHLQCLEEALKPLEEVLNLAQS |
| | | hIL2 | YASTYRVVSVLTVLHQDWLNGKEYK | (SEQ ID | KNFHLRPRDLISNINVIVLELKGSE |
| | | (R38A, | CKVSNKALPAPIEKTISKAKGQPRE | NO: 23) | TTFMCEYADETATIVEFLNRWITFA |
| | | F42A, Y45A, | PQVYTLPPCRDELTKNQVSLWCLVK | | QSIISTLT |
| | | E62A, C125A) | GFYPSDIAVEWESNGQPEN | | (SEQ ID |
| | | | NIYKTTPPVLDSDGSFFIYSKLTVD | | NO: 3) |
| | | | KSRWQQGNVFSCSVMHEALHNHYTQ | | |
| | | | KSLSLSPG | | |
| | | | (SEQ | | |
| | | | ID | | |
| | | | NO: 13) | | |
| AK508 | DNA609 | Hole: | DKTHTCPPCPAPELLGGPSVFLFPP | GPPSG | VPLSLY |
| | | hFc(N297A, | KPKDTLMASRTPEVTCVVVDVSHED | SSPG | (SEQ ID |
| | | [VPLSLY]- | PEVKFNWYVDGVEVHNAKTKPREEQ | (SEQ ID | NO: 28) |
| | | I253A)- | YASTYRVVSVLTVLHQDWLNGKEYK | NO: 36) | |
| | | hCD122 | CKVSNKALPAPIEKTISKAKGQPRE | | |
| | | | PQVCTLPPSRDELTKNQVSLSCAVK | | |
| | | | GFYPSDIAVEWESNGQPENNYKTTP | | |
| | | | PVLDSDGSFFLVSKLTVDKSRWQQG | | |
| | | | NVFSCSVMHEALHNHYTQKSLSLSP | | |
| | | | G | | |
| | | | (SEQ | | |
| | | | ID | | |
| | | | NO: 10) | | |
| AK509 | DNA575 | Hole: | DKTHTCPPCPAPELLGGPSVFLFPP | PGSGS | AVNGTSQFTCFYNSRANISCVWSQD |
| | | hFc(N297A, | KPKDTLMASRTPEVTCVVVDVSHED | (SEQ ID | GALQDTSCQVHAWPDRRRWNQTCEL |
| | | I253A)- | PEVKFNWYVDGVEVHNAKTKPREEQ | NO: 14) | LFVSQASWACNLILGAPDSQKLTTV |
| | | hCD122 | YASTYRVVSVLTVLHQDWLNGKEYK | | DIVTLRVLCREGVRWRVMAIQDFKP |
| | | | CKVSNKALPAPIEKTISKAKGQPRE | | FENLRLMAPISLQVVHVETHRCNIS |
| | | | PQVCTLPPSRDELTKNQVSLSCAVK | | WEISQASHYFERHLEFEARTLSPGH |
| | | | GFYPSDIAVEWESNGQPENNYKTTP | | TWEEAPLLTLKQKQEWICLETLTPD |
| | | | PVLDSDGSFFLVSKLTVDKSRWQQG | | TQYEFQVRVKPLQGEFTTWSPWSQP |
| | | | NVFSCSVMHEALHNHYTQKSLSLSP | | LAFRTKPAALGKD |
| | | | G | | (SEQ ID NO: 4) |
| | | | (SEQ | | |
| | | | ID | | |
| | | | NO: 10) | | |
| AK509 | DNA623 | Knob: | DKTHTCPPCPAPQLLGGPSVFLFPP | GGSSPP | MPYDLYHP |
| | | hFc(N297A, | KPKDTLMASRTPEVTCVVVDVSHED | (SEQ ID | (SEQ ID |
| | | I253A)- | PEVKFNWYVDGVEVHNAKTKPREEQ | NO: 32) | NO: 24) |
| | | [MPYDLYHP]- | YASTYRVVSVLTVLHQDWLNGKEYK | | |
| | | hIL2 | CKVSNKALPAPIEKTISKAKGQPRE | | |
| | | (R38A, | PQVYTLPPCRDELTKNQVSLWCLVK | | |
| | | F42A, Y45A, | GFYPSDIAVEWESNGQPEN | | |
| | | E62A, | NIYKTTPPVLDSDGSFFIYSKLTVD | | |
| | | C125A) | KSRWQQGNVFSCSVMHEALHNHYTQ | | |
| | | | KSLSLSPG | | |
| | | | (SEQ | | |
| | | | ID | | |
| | | | NO: 13) | | |
| AK510 | DNA577 | Knob: | DKTHTCPPCPAPQLLGGPSVFLFPP | GSSPPG | APTSSSTKKTQLQLEHLLLDLQMIL |
| | | hFc(N297A, | KPKDTLMASRTPEVTCVVVDVSHED | GGSSGG | NGINNYKNPKLTAMLTAKFAMPKKA |
| | | I253A)- | PEVKFNWYVDGVEVHNAKTKPREEQ | GSGP | TELKHLQCLEEALKPLEEVLNLAQS |
| | | hIL2 | YASTYRVVSVLTVLHQDWLNGKEYK | (SEQ ID | KNFHLRPRDLISNINVIVLELKGSE |
| | | (R38A, | CKVSNKALPAPIEKTISKAKGQPRE | NO: 23) | TTFMCEYADETATIVEFLNRWITFA |
| | | F42A, Y45A, | PQVYTLPPCRDELTKNQVSLWCLVK | | QSIISTLT |
| | | E62A, C125A) | GFYPSDIAVEWESNGQPEN | | (SEQ ID |
| | | | NIYKTTPPVLDSDGSFFIYSKLTVD | | NO: 3) |
| | | | KSRWQQGNVFSCSVMHEALHNHYTQ | | |
| | | | KSLSLSPG | | |
| | | | (SEQ | | |
| | | | ID | | |
| | | | NO: 13) | | |
| AK510 | DNA608 | Hole: hFc(N297A, | DKTHTCPPCPAPELLGGPSVFLFPP | | MPYDLYHP |
| | | I253A)- | KPKDTLMASRTPEVTCVVVDVSHED | | (SEQ ID |
| | | [MPYDLYHP]- | PEVKFNWYVDGVEVHNAKTKPREEQ | | NO: 24) |
| | | hCD122 | YASTYRVVSVLTVLHQDWLNGKEYK | | |
| | | | CKVSNKALPAPIEKTISKAKGQPRE | | |
| | | | PQVCTLPPSRDELTKNQVSLSCAVK | | |
| | | | GFYPSDIAVEWESNGQPENNYKTTP | | |
| | | | PVLDSDGSFFLVSKLTVDKSRWQQG | | |
| | | | NVFSCSVMHEALHNHYTQKSLSLSP | | |
| | | | G | | |
| | | | (SEQ | | |
| | | | ID | | |
| | | | NO: 10) | | |
| AK511 | DNA604 | Knob: | ESKYGPPCPPCPAPEFLGGPSVFLF | GSSPPG | APTSSSTKKTQLQLEHLLLDLQMIL |
| | | IgG4 | PPKPKDTLMISRTPEVTCVVVDVSQ | GGSSGG | NGINNYKNPKLTAMLTAKFAMPKKA |
| | | hFc- | EDPEVQFNWYVDGVEVHNAKTKPRE | GSGP | TELKHLQCLEEALKPLEEVLNLAQS |
| | | hIL2(R38A, | EQFNSTYRVVSVLTVLHQDWLNGKE | (SEQ ID | KNFHLRPRDLISNINVIVLELKGSE |
| | | F42A, Y45A, | YKCKVSNKGLPSSIEKTISKAKGQP | NO: 23) | TTFMCEYADETATIVEFLNRWITFA |
| | | E62A, C125A) | REPQVYTLPPSQEEMTKNQVSLSWC | | QSIISTLT |
| | | | LVKGFYPSDIAVEWESNGQPENNYK | | (SEQ ID |
| | | | TTPPVLDSDGSFFLYSRLTVDKSRW | | NO: 3) |
| | | | QEGNVFSCSVMHEALHNHYTQKSLS | | |
| | | | LSLG | | |
| | | | (SEQ | | |
| | | | ID | | |
| | | | NO: 296) | | |
| AK511 | DNA621 | Hole: | ESKYGPPCPPCPAPEFLGQPSVFLF | PSGSSPG | VPLSLY |
| | | hFcIgG4 | PPKPKDTLMISRTPEVTCVVVDVSQ | (SEQ ID | (SEQ ID |
| | | [VPLSLY]- | EDPEVQFNWYVDGVEVHNAKTKPRE | NO: 313) | NO: 28) |
| | | hCD122 | EQFNSTYRVVSVLTVLHQDVVLNGK | | |
| | | | EYKCKVSNKGLPSSIEKTISKAKGQ | | |
| | | | PREPQVCTLPPSQEEMTKNQVSLSC | | |
| | | | AVKGFYPSDIAVEWESNGQPENNYK | | |
| | | | TTPPVLDSDGSFFLYSRLTVDKSRW | | |
| | | | QEGNVFSCSVMHEALHNHYTQKSLS | | |
| | | | ISLGGP | | |
| | | | (SEQ | | |
| | | | ID | | |
| | | | NO: 297) | | |
| AK512 | DNA577 | Knob: | DKTHTCPPCPAPQLLGGPSVFLFPP | GSSPPG | APTSSSTKKTQLQLEHLLLDLQMIL |
| | | hFc(N297A, | KPKDTLMASRTPEVTCVVVDVSHED | GGSSGG | NGINNYKNPKLTAMLTAKFAMPKKA |
| | | I253A)- | PEVKFNWYVDGVEVHNAKTKPREEQ | GSGP | TELKHLQCLEEALKPLEEVLNLAQS |
| | | hIL2 | YASTYRVVSVLTVLHQDWLNGKEYK | (SEQ ID | KNFHLRPRDLISNINVIVLELKGSE |
| | | (R38A, | CKVSNKALPAPIEKTISKAKGQPRE | NO: 23) | TTFMCEYADETATIVEFLNRWITFA |
| | | F42A, Y45A, | PQVYTLPPCRDELTKNQVSLWCLVK | | QSIISTLT |
| | | E62A, C125A) | GFYPSDIAVEWESNGQPEN | | (SEQ ID |
| | | | NIYKTTPPVLDSDGSFFIYSKLTVD | | NO: 3) |
| | | | KSRWQQGNVFSCSVMHEALHNHYTQ | | |
| | | | KSLSLSPG | | |
| | | | (SEQ | | |
| | | | ID | | |
| | | | NO: 13) | | |
| AK512 | DNA625 | Hole: | DKTHTCPPCPAPELLGGPSVFLFPP | | |
| | | hFc(N297A, | KPKDTLMASRTPEVTCVVVDVSHED | | |
| | | I253A) | PEVKFNWYVDGVEVHNAKTKPREEQ | | |
| | | | YASTYRVVSVLTVLHQDWLNGKEYK | | |
| | | | CKVSNKALPAPIEKTISKAKGQPRE | | |
| | | | PQVCTLPPSRDELTKNQVSLSCAVK | | |
| | | | GFYPSDIAVEWESNGQPENNYKTTP | | |
| | | | PVLDSDGSFFLVSKLTVDKSRWQQG | | |
| | | | NVFSCSVMHEALHNHYTQKSLSLSP | | |
| | | | G | | |
| | | | (SEQ | | |
| | | | ID | | |
| | | | NO: 10) | | |
| AK513 | DNA604 | Knob: | ESKYGPPCPPCPAPEFLGGPSVFLF | GSSPPGG | APTSSSTKKTQLQLEHLLLDLQMIL |
| | | IgG4 | PPKPKDTLMISRTPEVTCVVVDVSQ | GSSGG | NGINNYKNPKLTAMLTAKFAMPKKA |
| | | hFc- | EDPEVQFNWYVDGVEVHNAKTKPRE | GSGP | TELKHLQCLEEALKPLEEVLNLAQS |
| | | hIL2(R38A, | EQFNSTYRVVSVLTVLHQDWLNGKE | (SEQ ID | KNFHLRPRDLISNINVIVLELKGSE |
| | | F42A, Y45A, | YKCKVSNKGLPSSIEKTISKAKGQP | NO: 23) | TTFMCEYADETATIVEFLNRWITFA |
| | | E62A, C125A) | REPQVYTLPPSQEEMTKNQVSLSWC | | QSIISTLT |
| | | | LVKGFYPSDIAVEWESNGQPENNYK | | (SEQ ID |
| | | | TTPPVLDSDGSFFLYSRLTVDKSRW | | NO: 3) |
| | | | QEGNVFSCSVMHEALHNHYTQKSLS | | |
| | | | LSLG | | |
| | | | (SEQ | | |
| | | | ID | | |
| | | | NO: 296) | | |
| AK513 | DNA626 | Hole: | ESKYGPPCPPCPAPEFLGGPSVFLF | | |
| | | hFcIgG4 | PPKPKDTLMISRTPEVTCVVVDVSQ | | |
| | | | EDPEVQFNWYVDGVEVHNAKTKPRE | | |
| | | | EQFNSTYRVVSVLTVLHQDVWLNGK | | |
| | | | EYKCKVSNKGLPSSIEKTISKAKGQ | | |
| | | | PREPQVCTLPPSQEEMTKNQVSLSC | | |
| | | | AVKGFYPSDIAVEWESNGQPENNYK | | |
| | | | TTPPVLDSDGSFFLYSRLTVDKSRW | | |
| | | | QEGMVFSCSVMHEALHNHYTQKSLS | | |
| | | | LSLGPG | | |
| | | | (SEQ | | |
| | | | ID | | |
| | | | NO: 298) | | |
| AK526 | DNA670 | Knob: | DKTHTCPPCPAPELLGGPSVFLFPP | GSSPPG | APTSSSTKKTQLQLEHLLLDLQMIL |
| | | hFc-hIL2 | KPKDTLMISRTPEVTCVVVDVSHED | GGSSGG | NGINNYKNPKLTAMLTAKFAMPKKA |
| | | (R38A, | PEVKFNWYVDGVEVHNAKTKPREEQ | GSGP | TELKHLQCLEEALKPLEEVLNLAQS |
| | | F42A, Y45A, | YNSTYRVVSVLTVLHQDWLNGKEYK | (SEQ ID | KNFHLRPRDLISNINVIVLELKGSE |
| | | E62A, C125A) | CKVSNKALPAPIEKTISKAKGQPRE | NO: 23) | TTFMCEYADETATIVEFLNRWITFA |
| | | | PQVYTLPPCRDELTKNQVSLWCLVK | | QSIISTLT |
| | | | GFYPSDIAVEWESNGQPENNYKTTP | | (SEQ ID |
| | | | PVLDSDGSFFLYSKLTVDKSRWQQG | | NO: 3) |
| | | | NVFSCSVMHEALHNHYTQKSLSLSP | | |
| | | | G | | |
| | | | (SEQ | | |
| | | | ID | | |
| | | | NO: 11) | | |
| AK526 | DNA672 | Hole: | DKTHTCPPCPAPELLGGPSVFLFPP | GPPSGSSPG | VPLSLY |
| | | hFc- | KPKDTLMISRTPEVTCVVVDVSHED | (SEQ ID | (SEQ ID |
| | | [VPLSLY]- | PEVKFNWYVDGVEVHNAKTKPREEQ | NO: 36) | NO: 28) |
| | | hCD122 | YNSTYRVVSVLWLHQDWLNGKEYKC | | |
| | | | KVSNKALPAPIEHISKAKGQPREPQ | | |
| | | | VCTLPPSRDELTKNQVSLSCAVKGF | | |
| | | | YPSDIAVEWESNGQPENNYKTTPPV | | |
| | | | LDSDGSFFLVSKLTVDKSRWQQGNV | | |
| | | | FSCSVMHEALHNHYTQKSLSLSPG | | |
| | | | (SEQ | | |
| | | | ID | | |
| | | | NO: 8) | | |
| AK530 | DNA25 | Knob: | DKTHTCPPCPAPELLGGPSVFLFPP | GSSPPGG | APTSSSTKKTQLQLEHLLLDLQMIL |
| | | hFc(N297A, | KPKDTLMISRTPEVTCVVVDVSHED | GSSGG | NGINNYKNPKLTAMLTAKFAMPKKA |
| | | hIL2 | PEVKFNWYVDGVEVHNAKTKPREEQ | GSGP | TELKHLQCLEEALKPLEEVLNLAQS |
| | | (R38A, | YASTYRVVSVLTVLHQDWLNGKEYK | (SEQ ID | KNFHLRPRDLISNINVIVLELKGSE |
| | | F42A, Y45A, | CKVSNKALPAPIEKTISKAKGQPRE | NO: 23) | TTFMCEYADETATIVEFLNRWITFA |
| | | E62A, | PQVYTLPPCRDELTKNQVSLWCLVK | | QSIISTLT |
| | | C125A) | GFYPSDIAVEWESNGQPENNYKTTP | | (SEQ ID |
| | | | PVLDSDGSFFLYSKLTVDKSRWQQG | | NO: 3) |
| | | | NVFSCSVMHEALHNHYTQKSLSLSP | | |
| | | | G | | |
| | | | (SEQ | | |
| | | | ID | | |
| | | | NO: 12) | | |
| AK530 | DNA612 | Hole: | DKTHTCPPCPAPELLGGPSVFLFPP | GPPSGSSP | MPYDLYHP |
| | | hFc(N297A, | KPKDTLMISRTPEVTCVVVDVSHED | (SEQ ID | (SEQ ID |
| | | I253A)- | PEVKFNWYVDGVEVHNAKTKPREEQ | NO: 9) | NO: 24) |
| | | [MPYDLYHP]- | YASTYRVVSVLTVLHQDWLNGKEYK | | |
| | | hCD122 | CKVSNKALPAPIEKTISKAKGQPRE | | |
| | | (C122S, | PQVCTLPPSRDELTKNQVSLSCAVK | | |
| | | C168S) | GFYPSDIAV | | |
| | | | EWESNGQPENNYKTTPPVLDSDGSF | | |
| | | | FLVSKLTVDKSRWQQGNVFSCSVMH | | |
| | | | EALHNHYTQKSLSLSPG | | |
| | | | (SEQ | | |
| | | | ID | | |
| | | | NO: 3) | | |
| AK531 | DNA255 | Knob: | DKTHTCPPCPAPELLGGPSVFLFPP | GSSPP | APTSSSTKKTQLQLEHLLLDLQMIL |
| | | hFc(N297A)* | KPKDTLMISRTPEVTCVVVDVSHED | GGGS | MGINNYKNPKLTAMLTAKFAMPKKA |
| | | hIL2(R38A, | PEVKFNWYVDGVEVHNAKTKPREEQ | SGGGSGP | TELKHLQCLEEALKPLEEVLNLAQS |
| | | Y45A, | YASTYRVVSVLTVLHQDWLNGKEYK | (SEQ ID | KNFHLRPRDLISNINVIVLELKGSE |
| | | C125A) | CKVSNKALPAPIEKTISKAKGQPRE | NO: 23) | TTFMCEYADETATIVEFLNRWITFA |
| | | | PQVYTLPPCRDELTKNQVSLWCLVK | | QSIISTLT |
| | | | GFYPSDIAVEWESNGQPENNYKTTP | | (SEQ ID |
| | | | PVLDSDGSFFLYSKLTVDKSRWQQG | | NO: 3) |
| | | | NVFSCSVMHEALHNHYTQKSLSLSP | | |
| | | | G | | |
| | | | (SEQ | | |
| | | | ID | | |
| | | | NO: 12) | | |
| AK531 | DNA614 | Hole: | DKTHTCPPCPAPELLGGPSVFLFPP | GPPSG | DSGGFMLT |
| | | hFc(N297A)- | KPKDTLMISRTPEVTCVVVDVSHED | SSPG | (SEQ ID |
| | | [DSGGFMLT]- | PEVKENWYVDGVEVHNAKTKPREEQ | (SEQ ID | NO: 25) |
| | | hCD122 | YASTYRVVSVLTVLHQDWLNGKEYK | NO: 36) | |
| | | (C122S, | CKVSNKALPAPIEKTISKAKGQPRE | | |
| | | C16SS) | PQVCTLPPSRDELTKNQVSLSCAVK | | |
| | | | GFYPSDIAVEWESNGQPFNNYKTTP | | |
| | | | PVLDSDGSFFLVSKLTVDKSRWQQG | | |
| | | | NVFSCSVMHEALHNHYTQKSLSLSP | | |
| | | | G | | |
| | | | (SEQ | | |
| | | | ID | | |
| | | | NO: 9) | | |
| AK532 | DNA669 | Hole: | DKTHTCPPCPAPELLGGPSVFLFPP | PGSGS | AVMGTSQFTCFYNSRANISCVWSQD |
| | | hFc-hCD122 | KPKDTLMISRTPEVTCVVVDVSHED | (SEQ ID | GALQDTSCQVHAWPDRRRWNQTCEL |
| | | | PEVKFNWYVDGVEVHNAKTKPREEQ | NO: 14) | LPVSQASWACNLILGAPDSQKLTTV |
| | | | YNSTYRVVSVLTVLHQDWLNGKEYK | | DIVTLRVLCREGVRWRVMAIQDFKP |
| | | | CKVSNKALPAPIEKTISKAKGQPRE | | FENLRLMAPISLQVVHVETHRCNIS |
| | | | PQVCTLPPSRDELTKNQVSLSCAVK | | WEISQASHYFERHLEFEARTLSPGH |
| | | | GEYPSDIAVEWESNGQPENNYKTCP | | TWEEAPLLTLKQKQEWICLETLTPD |
| | | | PVLDSDGSFFLVSKLTVDKSRWQQG | | TQYEFQVRVKPLQGEFTTWSPWSQP |
| | | | MVFSCSVMHEALHNHYTQKSLSLSP | | LAFRTKPAALGKD |
| | | | G | | (SEQ ID |
| | | | (SEQ | | NO: 4) |
| | | | ID | | |
| | | | NO: 8) | | |
| AK532 | DNA671 | Knob: | DKTHTCPPCPAPELLGGPSVFLFPP | GSPG | |
| | | hFc- | KPKDTLMISRTPEVTCVVVDVSHED | (SEQ ID | |
| | | [VPLSLY]- | PEVKFNWYVDGVEVHNAKTKPREEQ | NO: 34) | |
| | | hIL2 | YNSTYRVVSVLTVLHQDWLNGKEYK | | |
| | | (R38A, F42A, | CKVSNKALPAPIEKTISKAKGQPRE | | |
| | | Y45A, | PQVYTLPPCRDTLTKNQVSLWCLVK | | |
| | | E62A; | GFYPSDIAVEWE | | |
| | | C125A) | SNGQPENNYKTTPPVLDSDGSFFLY | | VPLSLY |
| | | | SKLTVDKSRWQQGNVFSCSVMHEAL | | (SEQ ID |
| | | | HNHYTQKSLSLSPG | | NO: 28) |
| | | | (SEQ | | |
| | | | ID | | |
| | | | NO: 11) | | |

| | | | Component4 | Component5 | |
|---|---|---|---|---|---|
| Molecule | name | newnames | Sequence | Sequence | FullSSequence |
| AK368 | DNA187 | Hole: | | | DKTHTCPPCPAPELLGGPSVFLFPPKPKDTLMISRTPEVT |
| | | hFc(N297A)- | | | CVVVDVSHEDPEVKFNWYVDGVEVHNAKTKPREEQYASTY |
| | | hCD122 | | | RVVSVLTVLHQDWLKGKEYKCKVSNKALPAPIEKTISKAK |
| | | | | | GQPREPQVCTLPPSRDELTKNQVSLSCAVKGFYPSDIAVE |
| | | | | | WESNGQPENNYKTTPPVIDSDGSFFLVSKLTVDKSRWQQG |
| | | | | | NVFSCSVMHEALHNHYTQKSLSLSPG |
| | | | | | (SEQ ID NO: 38) |
| AK368 | DNA476 | Knob: | GP | APTSSSTKKTQLQLEHLLLDLQMI | DKTHTCPPCPAPELLGGPSVFLFPPKPKDTLMISRTPEVT |
| | | hFc(N297A)- | | LNGINNYKNPKLTRMLTSKFYMPK | CVVVDVSHEDPEVKFNWYVDGVEVHNAKTKPREEQYASTY |
| | | [NPMGSDP | | KATELKHLQCLEESLKPLEEVLNL | RVVSVLTVLHQDWLNGKEYKCKVSNKALPAPIEKTISKAK |
| | | VNFKLLRW | | AQSKNFHLRPRDLISNINVIVLEL | GQPREPQVYT1PPCRDELTKNQVSLWCLVKGFYPSDIAVE |
| | | NG]-hIL2 | | KGSETTFMCEYADETATIVEFLNR | WESNGQPENNYKTTPPVIDSDGSFFLYSKLTVDKSRWQQG |
| | | (F42S, | | WITFAQSIISTLT (SEQ ID | NVFSCSVMHEALHNHYTQKSLSLSPG |
| | | E62S, C1213A) | | NO: 74) | (SEQ ID NO: 360) |
| AK375 | DNA477 | Knob: | | | TIKPCPPCKCPAPNAAGGPSVFIFPPKIKDVLMISLSPIV |
| | | mFcIgG2a | | | TCVVVDVSEDDPDVQISWEFNNVEVHTAQTQTHREDYNST |
| | | (LALAPG)- | | | LRVVSALPIQHQDWMSGKEFKCKVNNKDLGAPIERTISKP |
| | | hIL2(R38A, | | | KGSVRAPQVYVLPPCEEEMTKKQVTLWCMVTDFMPEDIYV |
| | | F42A, | | | EWTNNGKTELNYKNTEPVLDSDGSYFMYSKLRVEKKNWVE |
| | | Y45A, E62A, | | | RNSYSCSVVHEGLHNHHTTKSFSRTPGGGSSPPGGGSSGG |
| | | C125A) | | | GSGPAPTSSSTKKTQLQLEHLLLDLQMILNGINNYKNPKL |
| | | | | | TAMLTAKEAMPKKATELKHLQCLEEALKPLEEVLNLAQSK |
| | | | | | NFHLRPRDLISNINVIVLELKGSETTFMCEYADETATIVE |
| | | | | | FLNRWITFAQSIISTLT |
| | | | | | (SEQ ID NO: 361) |
| AK375 | DNA479 | Hole: | | | TIKPCPPCKCPAPNAAGGPSVFIFPPKIKDVLMISLSPIV |
| | | mFcIgG2a | | | TCVVVDVSEDDPDVQISWFVNNVEVHTAQTQTHREDYNST |
| | | (LALAPG) | | | LRVVSALPIQHQDWMSGKEFKCKVNNKDLGAPIERTISKP |
| | | | | | KGSVRAPQVCVLPPPEEEMTKKQVTLSCAVTDFMPEDIYV |
| | | | | | EWTNNGKTELNYKNTEPVLDSDGSYFMVSKLRVEKKNWVE |
| | | | | | RNSYSCVVHEGLHNHHTTKSFSRTPG |
| | | | | | (SEQ ID NO: 281) |
| AK376 | DNA478 | Knob: | SGP | APTSSSTKKTQL | TIKPCPPCKCPAPNAAGGPSVFIFPPKIKDVLMISLSP |
| | | mFcIgG2a | (SEQ ID | QLEHLLLDLQMI | IVTCVVVDVSEDDPDVQISWFVNNVEVHTAQTQTHRED |
| | | (LALAPG)- | NO: 29) | LNGiNNYKNPKL | YNSTLRVVSALPIQHQDWMSGKEFKCKVNNKDLGAPIE |
| | | [VPLSLY]- | | TAMLTAKFAMP | RTISKPKGSVRAPQVYVLPPCEEEMTKKQVTLWCMVTD |
| | | hIL2 | | KKATELKHLQCL | FMPEDIYVEWTNNGKTELNYKNTEPVLDSDGSYFMYSK |
| | | (R38A, | | EEALKPLEEVLN | LRVEKKNWVERNSYSCSLLHEGLHNHHTTKSFSRTPGG |
| | | F42A, | | LAQSKNFHLRPR | SPGVPLSLYSGPAPTSSSTKKTQLQLEHLLLDLQMIL |
| | | Y45A, | | DLISNINVIVLEL | NGINNYKNPKLTAMLTAKFAMPKKATELKHLQCLEEA |
| | | E62A, | | KGSETTFMCEY | LKPLEEVLNLAQSKNFHLRPRDLISNINVIVLELKGS |
| | | C125A) | | ADETATIVEFLN | ETTFMCEYADETATIVEFLNRWITFAQSIISTLT |
| | | | | RWITFAQSIISTL | (SRQ ID NO: 362) |
| | | | | T | |
| | | | | (SEQ ID | |
| | | | | NO: 3) | |
| AK376 | DNA479 | Hole: | | | TIKPCPPCKCPAPNAAGGPSVFIFPPKIKDVLMISLSPIV |
| | | mFcIgG2a | | | TCVVVDVSEDDPDVQISWFVNNVEVHTAQTQTHREDYNST |
| | | (LALAPG) | | | LRVVSALPIQHQDWMSGKEFKCKVNNKDLGAPIERTISKP |
| | | | | | KGSVRAPQVCVLPPPEEEMTKKQVTLSCAVTDFMPEDIYV |
| | | | | | EWTNNGKTELNYKNTEPVLDSDGSYFMVSKLRVEKKNWVE |
| | | | | | RNSYSCVVHEGLHNHHTTKSFSRTPG |
| | | | | | (SEQ ID NO: 281) |
| AK377 | DNA477 | Knob: | | | TIKPCPPCKCPAPNAAGGPSVFIFPPKIKDVLMISLSPIV |
| | | mFcIgG2a | | | TCVVVDVSEDDPDVQISWEFNNVEVHTAQTQTHREDYNST |
| | | (LALAPG)- | | | LRVVSALPIQHQDWMSGKEFKCKVNNKDLGAPIERTISKP |
| | | hIL2(R38A, | | | KGSVRAPQVYVLPPCEEEMTKKQVTLWCMVTDFMPEDIYV |
| | | F42A, | | | EWTNNGKTELNYKNTEPVLDSDGSYFMYSKLRVEKKNWVE |
| | | Y45A, | | | RNSYSCSVVHEGLHNHHTTKSFSRTPGGGSSPPGGGSSGG |
| | | E62A, | | | GSGPAPTSSSTKKTQLQLEHLLLDLQMILNGINNYKNPKL |
| | | C125A) | | | TAMLTAKEAMPKKATELKHLQCLEEALKPLEEVLNLAQSK |
| | | | | | NFHLRPRDLISNINVIVLELKGSETTFMCEYADETATIVE |
| | | | | | FLNRWITFAQSIISTLT |
| | | | | | (SEQ ID NO: 361) |
| AK377 | DNA480 | Hole: | | | TIKPCPPCKCPAPNAAGGPSVFIFPPKIKDV |
| | | mFcIgG2a | | | LMISLSPIVTCVVVDVSEDDPDVQISWFVN |
| | | (LALAPG)- | | | NVEVHTAQTQTHREDYNSTLRVVSALPIQH |
| | | hCD122 | | | QDWMSGKEFKCKVNNKDLGAPIERTISKPK |
| | | | | | GSVRAPQVCVLPPPEEEMTKKQVTLSCAVT |
| | | | | | DFMPEDIYVEWTNNGCTELNYKNTEPVLDS |
| | | | | | DGSYFMVSKLRVEKKNWVERNSYSCSWHEG |
| | | | | | LKNHHTTKSFSRTPGPGSGSAVNGTSQFTC |
| | | | | | FYNSRANISCVVVSQDGALQDTSCQVHAWP |
| | | | | | DRRRWNQTCELLPVSQASWACNLILGAPDS |
| | | | | | QKLTTVDIVTLRVLCREGVRWRVMAIQDFK |
| | | | | | PFENLRLMAPISLQVVHVETHRCNISWEISQ |
| | | | | | ASHYFERHLEFEARTLSPGHTWEEAPLLTL |
| | | | | | KQKQEWICLETLTPDTQYEFQVRVKPLQGE |
| | | | | | FTTWSPVVSQPLAFRTKPAALGKD |
| | | | | | (SEQ ID NO: 363) |
| AK378 | DNA478 | Knob: | SGP | APTSSSTKKTQL | TIKPCPPCKCPAPNAAGGPSVFIFPPKIKDVLMISLSP |
| | | mFcIgG2a | (SEQ ID | QLEHLLLDLQMI | IVTCVVVDVSEDDPDVQISWFVNNVEVHTAQTQTHRED |
| | | (LALAPG)- | NO: 29) | LNGiNNYKNPKL | YNSTLRVVSALPIQHQDWMSGKEFKCKVNNKDLGAPIE |
| | | [VPLSLY]- | | TAMLTAKFAMP | RTISKPKGSVRAPQVYVLPPCEEEMTKKQVTLWCMVTD |
| | | hIL2 | | KKATELKHLQCL | FMPEDIYVEWTNNGKTELNYKNTEPVLDSDGSYFMYSK |
| | | (R38A, | | EEALKPLEEVLN | LRVEKKNWVERNSYSCSLLHEGLHNHHTTKSFSRTPGG |
| | | F42A, | | LAQSKNFHLRPR | SPGVPLSLYSGPAPTSSSTKKTQLQLEHLLLDLQMIL |
| | | Y45A, | | DLISNINVIVLEL | NGINNYKNPKLTAMLTAKFAMPKKATELKHLQCLEEA |
| | | E62A, | | KGSETTFMCEY | LKPLEEVLNLAQSKNFHLRPRDLISNINVIVLELKGS |
| | | C125A) | | ADETATIVEFLN | ETTFMCEYADETATIVEFLNRWITFAQSIISTLT |
| | | | | RWITFAQSIISTL | (SEQ ID NO: 362) |
| | | | | T | |
| | | | | (SEQ ID | |
| | | | | NO: 3) | |
| AK378 | DNA480 | Hole: | | | TIKPCPPCKCPAPNAAGGPSVFIFPPKIKDV |
| | | mFcIgG2a | | | LMISLSPIVTCVVVDVSEDDPDVQISWFVN |
| | | (LALAPG)- | | | NVEVHTAQTQTHREDYNSTLRVVSALPIQH |
| | | hCD122 | | | QDWMSGKEFKCKVNNKDLGAPIERTISKPK |
| | | | | | GSVRAPQVCVLPPPEEEMTKKQVTLSCAVT |
| | | | | | DFMPEDIYVEWTNNGCTELNYKNTEPVLDS |
| | | | | | DGSYFMVSKLRVEKKNWVERNSYSCSWHEG |
| | | | | | LKNHHTTKSFSRTPGPGSGSAVNGTSQFTC |
| | | | | | FYNSRANISCVVVSQDGALQDTSCQVHAWP |
| | | | | | DRRRWNQTCELLPVSQASWACNLILGAPDS |
| | | | | | QKLTTVDIVTLRVLCREGVRWRVMAIQDFK |
| | | | | | PFENLRLMAPISLQVVHVETHRCNISWEISQ |
| | | | | | ASHYFERHLEFEARTLSPGHTWEEAPLLTL |
| | | | | | KQKQEWICLETLTPDTQYEFQVRVKPLQGE |
| | | | | | FTTWSPVVSQPLAFRTKPAALGKD |
| | | | | | (SEQ ID NO: 363) |
| AK397 | DNA158 | Hole: | | | DKTHTCPPCPAPELLGGPSVFLFPPKPKDTL |
| | | hFc | | | MISRTPEVTCVVVDVSHEDPEVKFNWYVDGV |
| | | (N297A) | | | EVHNAKTKPREEQYASTYRVVSVLTVLHQDW |
| | | | | | LNGKEYKCKVSNKALPAPIEKTISKAKGQPR |
| | | | | | EPQVCTLPPSRDELTKNQVSLSCAVKGFYPS |
| | | | | | DIAVEWESNGQPENNYKTTPPVLDSDGSFFL |
| | | | | | VSKLTVDKSRWQQGMVFSCSVMHEALHNHY |
| | | | | | TQKSLSLSPG |
| | | | | | (SEQ ID NO: 9) |
| AK397 | DNA278 | Knob: | SGP | APTSSSTKKTQL | DKTHTCPPCPAPELIGGPSVFLFPPKPKDTLMIS |
| | | hFc(N297A)- | (SEQ ID | QLEHLLLDLQMI | RTPEVTCVVVDVSHEDPEVKFNWYVDGVEVHNAK |
| | | [DSGGFMLT] | NO: 29) | LNGINNYKNPKL | TKPREEQYASTYRVVSVLTVLHQDWLNGKEYKCK |
| | | hIL2 | | TRMLTFKFYMP | VSNKALPAPIEKTISKAKGQPREPQVYTLPPCRD |
| | | (C125A) | | KKATEIKHIQCL | ELTKNQVSLWCLVKGFYPSDIAVEWESNGQPENN |
| | | | | EEELKPLEEVLN | YKTTPPVLDSDGSFFLYSKLTVDKSRWQQGNVFS |
| | | | | LAQSKNFHLRPR | CSVMHEALHNHYTQKSLSLSPGGSGPDSGGFMLT |
| | | | | DLISNINVTVLEL | SGPAPTSSSTKKTQLQLEHLLIDLQMILNGINNY |
| | | | | KGSETTFMCEY | KNPKLTRMLTFKFYMPKKATELKHLQCLEEELKP |
| | | | | ADETATIVEFLN | LEEVLNLAQSKNFHLRPRDLISNINVIVLELKGS |
| | | | | RWITFAQSIISTL | ETTFMCEYADETATlVEFlNRWITFAQSIISTL |
| | | | | T (SEQ ID | T (SEQ ID NO: 357) |
| | | | | NO: 62) | |
| AK429 | DNA477 | Knob: | | | TIKPCPPCKCPAPNAAGGPSVFIFPPKIKD |
| | | mFcIgG2a | | | VLMISLSPIVTCVVVDVSEDDPDVQISWFV |
| | | (LALAPG)- | | | NNVEVHTAQTQTHREDYNSTLRVVSALPIQ |
| | | hIL2(R38A, | | | HQDWMSGKEFKCKVNNKDLGAPIERTISKP |
| | | F42A, | | | KGSVRAPQVYVLPPCEEEMTKKQVTLWCMV |
| | | Y45A, | | | TDFMPEDIYVEWTNNGKTELYKNTEPVLDS |
| | | E62A, | | | DGSYFMYSKLRVEKKNWVERNSYSCSVVHE |
| | | C125A) | | | GLHNHHTTKSFSRTPGGGSSPPGGGSSGGG |
| | | | | | SGPAPTSSSTKKTQLQLEHLLLDLQMILNG |
| | | | | | INNYKNPKLTAMLTAKFAMPKKATELKHLQ |
| | | | | | CLEEALKPLEEVLNLAQSKNFHLRPRDLIS |
| | | | | | NINVIVLELKGSETTFMCEYADETATIVEF |
| | | | | | LNRWITFAQSIISTLT |
| | | | | | (SEQ ID NO: 361) |
| AK429 | DNA520 | Hole: | | | TIKPCPPCKCPAPNAAGGPSVFIFPPKIKDV |
| | | mFcIgG2a | | | LMLSLSPTVTCVVVDVSEDDPDVQISWFVN |
| | | (LALAPG)- | | | NVEVHTAQTQTHREDYNSTLRVVSALPIQH |
| | | No | | | QDVVMSGKEFKCKVNNKDLGAPIERTISKP |
| | | Annotation | | | KGSVRAPQVCVLPPPEEEMTKKQVTLSCAV |
| | | Found | | | TDFMPEDIYVEWTNNGKTELNYKMTEPVLD |
| | | | | | SDGSYFMVSKLRVEKKNWVERNSYSCSVVH |
| | | | | | EGLHNHHTTKSFSRTPGHHHHHHHH |
| | | | | | (SEQ ID NO: 365) |
| AK430 | DNA477 | Knob: | | | TIKPCPPCKCPAPNAAGGPSVFIFPPKIKD |
| | | mFcIgG2a | | | VLMISLSPIVTCVVVDVSEDDPDVQISWFV |
| | | (LALAPG)- | | | NNVEVHTAQTQTHREDYNSTLRVVSALPIQ |
| | | hIL2(R38A, | | | HQDWMSGKEFKCKVNNKDLGAPIERTISKP |
| | | F42A, | | | KGSVRAPQVYVLPPCEEEMTKKQVTLWCMV |
| | | Y45A, | | | TDFMPEDIYVEWTNNGKTELYKNTEPVLDS |
| | | E62A, | | | DGSYFMYSKLRVEKKNWVERNSYSCSVVHE |
| | | C125A) | | | GLHNHHTTKSFSRTPGGGSSPPGGGSSGGG |
| | | | | | SGPAPTSSSTKKTQLQLEHLLLDLQMILNG |
| | | | | | INNYKNPKLTAMLTAKFAMPKKATELKHLQ |
| | | | | | CLEEALKPLEEVLNLAQSKNFHLRPRDLIS |
| | | | | | NINVIVLELKGSETTFMCEYADETATIVEF |
| | | | | | LNRWITFAQSIISTLT |
| | | | | | (SEQ ID NO: 361) |
| AK430 | DNA521 | Hole: | GHHH | | TIKPCPPCKCPAPNAAGGPSVFIFPPKIKDV |
| | | mFcIgG2a | HHHHH | | LMISISPIVTCVVVDVSEDQPDVQISWFVN |
| | | (LALAPG)- | (SEQ ID | | NVEVHTAQTQTHREDYNSTLRWSALPIQHQ |
| | | hCD122 | NO: 334) | | PWMSGKEFKCKVNNKDLGAPIERTISKPKG |
| | | No | | | SVRAPQVCVLPPPEEEMTKKQVTLSCAVTD |
| | | Annotation | | | FMPEDIYVEWTNNGKTELNYKNTEPVLDSD |
| | | Found | | | GSYFMVSKLRVEKKNWVERNSYSCSVVHEG |
| | | | | | LHNHHTTKSFSRTPGPGSGSAVNGTSQFTC |
| | | | | | FYNSRANISCVWSQDGALQDTSCQVHAWPD |
| | | | | | RRRWNQTCELLPVSQASVVACNLILGAPDS |
| | | | | | QKITTVDIVTLRVICREGVRWRVMAIQDFK |
| | | | | | PFENLRLMAPISLQVVHVETHRCNISW |
| | | | | | EISQASHYFERHLEFEARTLSPGHTWEEAP |
| | | | | | ILTLKQKQEWICLETLTPDTQYEFQVRVKP |
| | | | | | LQGEFTTWSPWSQPLAFRTKPAALGKDGHH |
| | | | | | HHHHHH |
| | | | | | (SEQ ID NO: 366) |
| AK431 | DNA477 | Knob: | | | TIKPCPPCKCPAPNAAGGPSVFIFPPKIKD |
| | | mFcIgG2a | | | VLMISLSPIVTCVVVDVSEDDPDVQISWFV |
| | | (LALAPG)- | | | NNVEVHTAQTQTHREDYNSTLRVVSALPIQ |
| | | hIL2(R38A, | | | HQDWMSGKEFKCKVNNKDLGAPIERTISKP |
| | | F42A, | | | KGSVRAPQVYVLPPCEEEMTKKQVTLWCMV |
| | | Y45A, | | | TDFMPEDIYVEWTNNGKTELYKNTEPVLDS |
| | | E62A, | | | DGSYFMYSKLRVEKKNWVERNSYSCSVVHE |
| | | C125A) | | | GLHNHHTTKSFSRTPGGGSSPPGGGSSGGG |
| | | | | | SGPAPTSSSTKKTQLQLEHLLLDLQMILNG |
| | | | | | INNYKNPKLTAMLTAKFAMPKKATELKHLQ |
| | | | | | CLEEALKPLEEVLNLAQSKNFHLRPRDLIS |
| | | | | | NINVIVLELKGSETTFMCEYADETATIVEF |
| | | | | | LNRWITFAQSIISTLT |
| | | | | | (SEQ ID NO: 361) |
| AK431 | DNA522 | Knob: | GHHH | | TIKPCPPCKCPAPNAAGGP5VFIFPPKIKDV |
| | | mFcIgG2a | HHHHH | | LMISLSPIVTCVVVDVSEDDPDVQISWFVN |
| | | (LALAPG)- | (SEQ ID | | NVEVHTAQTQTHREDYNSTLRWSALPIQHQ |
| | | hCD122 | NO: 334) | | DWMSGKEFKCKVNNKDLGAPIERTISKPKG |
| | | No | | | SVRAPQVCVLPPPEEEMTKKQVTLSCAVTD |
| | | Annotation | | | FMPEDIYVEWTNNGKTELNYKNTEPVLDSD |
| | | Found | | | GSYFMVSKLRVEKKNWVERNSYSCSVVHEG |
| | | | | | LHNHHTTKSFSRTPGPGSGSAVKNCSHLEC |
| | | | | | FYNSRANVSCMWSHEEALNVTTCHVHAKSN |
| | | | | | LRHWNKTCELTLVRQASWACMLILGSFPES |
| | | | | | QSLTSVDLLDINVVCWEEKGWRRVKTCDFH |
| | | | | | PFDNLRLVAPHSLQVLHIDTQRCNISWKVS |
| | | | | | QVSHYIEPYLEFEARRRLLGHSWEDASVLS |
| | | | | | LKQRQQWLFLEMLIPSTSYEVQVRVKAQRN |
| | | | | | NTGTWSPWSQPLTFRTRPADPMKEGHHHHH |
| | | | | | HHH (SEQ ID NO: 367) |
| AK432 | DNA478 | Knob: | SGP | APTSSSTKKTQL | TIKPCPPCKCPAPNAAGGPSVFIFPPKIKDVLMISLSP |
| | | mFcIgG2a | (SEQ ID | QLEHLLLDLQMI | IVTCVVVDVSEDDPDVQISWFVNNVEVHTAQTQTHRED |
| | | (LALAPG)- | NO: 29) | LNGINNYKNPKL | YNSTLRVVSALPIQHQDWMSGKEFKCKVNNKDLGAPIE |
| | | [VPLSLY] | | TAMLTAKFAMP | RTISKPKGSVRAPQVYVLPPCEEEMTKKQVTLWCMVTD |
| | | hIL2(R38A, | | KKATELKHLQCL | FMPEDIYVEWTNNGKTELNYKNTEPVLDSDGSYFMYSK |
| | | F42A, | | EEALKPLEEVLN | LRVEKKNWVERNSYSCSLLHEGLHNHHTTKSFSRTPGG |
| | | Y45A, | | LAQSKNFHLRPR | SPGVPLSLYSGPAPTSSSTKKTQLQLEHLLLDLQMIL |
| | | E62A, | | DLISNINVIVL | NGINNYKNPKLTAMLTAKFAMPKKATELKHLQCLEEA |
| | | C125A) | | ELKGSETTFMC | LKPLEEVLNLAQSKNFHLRPRDLISNINVIVLELKGS |
| | | | | EYADETATIVEF | ETTFMCEYADETATIVEFLNRWITFAQSIISTLT |
| | | | | LNRWITFAQSII | (SEQ ID NO: 362) |
| | | | | STLT | |
| | | | | (SEQ ID | |
| | | | | NO: 3) | |
| AK432 | DNA521 | Hole: | GHHH | | TIKPCPPCKCPAPNAAGGPSVFIFPPKIKDV |
| | | mFcIgG2a | HHHHH | | LMISISPIVTCVVVDVSEDQPDVQISWFVN |
| | | (LALAPG)- | (SEQ ID | | NVEVHTAQTQTHREDYNSTLRWSALPIQHQ |
| | | hCD122 | NO: 334) | | PWMSGKEFKCKVNNKDLGAPIERTISKPKG |
| | | No | | | SVRAPQVCVLPPPEEEMTKKQVTLSCAVTD |
| | | Annotation | | | FMPEDIYVEWTNNGKTELNYKNTEPVLDSD |
| | | Found | | | GSYFMVSKLRVEKKNWVERNSYSCSVVHEG |
| | | | | | LHNHHTTKSFSRTPGPGSGSAVNGTSQFTC |
| | | | | | FYNSRANISCVWSQDGALQDTSCQVHAWPD |
| | | | | | RRRWNQTCELLPVSQASVVACNLILGAPDS |
| | | | | | QKITTVDIVTLRVICREGVRWRVMAIQDFK |
| | | | | | PFENLRLMAPISLQVVHVETHRCNISW |
| | | | | | EISQASHYFERHLEFEARTLSPGHTWEEAP |
| | | | | | ILTLKQKQEWICLETLTPDTQYEFQVRVKP |
| | | | | | LQGEFTTWSPWSQPLAFRTKPAALGKDGHH |
| | | | | | HHHHHH |
| | | | | | (SEQ ID NO: 366) |
| AK433 | DNA478 | Knob: | SGP | APTSSSTKKTQL | TIKPCPPCKCPAPNAAGGPSVFIFPPKIKDVLMISLSP |
| | | mFcIgG2a | (SEQ ID | QLEHLLLDLQMI | IVTCVVVDVSEDDPDVQISWFVNNVEVHTAQTQTHRED |
| | | (LALAPG)- | NO: 29) | LNGINNYKNPKL | YNSTLRVVSALPIQHQDWMSGKEFKCKVNNKDLGAPIE |
| | | [VPLSLY] | | TAMLTAKFAMP | RTISKPKGSVRAPQVYVLPPCEEEMTKKQVTLWCMVTD |
| | | hIL2(R38A, | | KKATELKHLQCL | FMPEDIYVEWTNNGKTELNYKNTEPVLDSDGSYFMYSK |
| | | F42A, | | EEALKPLEEVLN | LRVEKKNWVERNSYSCSLLHEGLHNHHTTKSFSRTPGG |
| | | Y45A, | | LAQSKNFHLRPR | SPGVPLSLYSGPAPTSSSTKKTQLQLEHLLLDLQMIL |
| | | E62A, | | DLISNINVIVL | NGINNYKNPKLTAMLTAKFAMPKKATELKHLQCLEEA |
| | | C125A) | | ELKGSETTFMC | LKPLEEVLNLAQSKNFHLRPRDLISNINVIVLELKGS |
| | | | | EYADETATIVEF | ETTFMCEYADETATIVEFLNRWITFAQSIISTLT |
| | | | | LNRWITFAQSII | (SEQ ID NO: 362) |
| | | | | STLT | |
| | | | | (SEQ ID | |
| | | | | NO: 3) | |
| AK433 | DNA522 | Knob: | GHHH | | TIKPCPPCKCPAPNAAGGP5VFIFPPKIKDV |
| | | mFcIgG2a | HHHHH | | LMISLSPIVTCVVVDVSEDDPDVQISWFVN |
| | | (LALAPG)- | (SEQ ID | | NVEVHTAQTQTHREDYNSTLRWSALPIQHQ |
| | | hCD122 | NO: 334) | | DWMSGKEFKCKVNNKDLGAPIERTISKPKG |
| | | No | | | SVRAPQVCVLPPPEEEMTKKQVTLSCAVTD |
| | | Annotation | | | FMPEDIYVEWTNNGKTELNYKNTEPVLDSD |
| | | Found | | | GSYFMVSKLRVEKKNWVERNSYSCSVVHEG |
| | | | | | LHNHHTTKSFSRTPGPGSGSAVKNCSHLEC |
| | | | | | FYNSRANVSCMWSHEEALNVTTCHVHAKSN |
| | | | | | LRHWNKTCELTLVRQASWACMLILGSFPES |
| | | | | | QSLTSVDLLDINVVCWEEKGWRRVKTCDFH |
| | | | | | PFDNLRLVAPHSLQVLHIDTQRCNISWKVS |
| | | | | | QVSHYIEPYLEFEARRRLLGHSWEDASVLS |
| | | | | | LKQRQQWLFLEMLIPSTSYEVQVRVKAQRN |
| | | | | | NTGTWSPWSQPLTFRTRPADPMKEGHHHHH |
| | | | | | HHH (SEQ ID NO: 367) |
| AK435 | DNA263 | Knob: | SGP | APTSSSTKKTQL | DKTHTCPPCPAPELLGGPSVFLFPPKPKDTL |
| | | hFc | (SEQ ID | QLEHLLLDLQMI | MISRTPEVTCVVVDVSHEDPEVKFNWYVDG |
| | | (N297A)- | NO: 29) | LNGINNYKNPKL | VEVHNAKTKPREEQYASTYRVVSVLTVLHQ |
| | | [VPLSLY] | | TAMLTAKFAMP | DWLNGKEYKCKVSNKALPAPIEKTISKAKG |
| | | hIL2(R38A, | | KKATELKHLQCL | QPREPQVYTLPPCRDELTKNQVSLWCLVKG |
| | | F42A, | | EEALKPLEEVLN | FYPSDIAVEWESMGQPENNYICRRPPVLDS |
| | | Y45A, | | LAQSKNFHLRPR | QGSFFLYSKLTVDKSRWQQGNVFSCSVMHE |
| | | E62A, | | DLISNINVIVL | ALHNHYTQKSLSISPGGSPGVPLSLYSGPA |
| | | C125A) | | ELKGSETTFMC | PTSSSTKKTQLQIPHLIIQLQMILNGINNY |
| | | | | EYADETATIVEF | KNPKLTAMLTAKFAMPKKATELKHLQCLEE |
| | | | | LNRWITFAQSII | ALKPLEEVLNLAQSKNFHLRPRDLISNINV |
| | | | | STLT | IVLELKGSETTFMCEYADETATIVEFLNRW |
| | | | | (SEQ ID | ITFAQSIISTLT (SEQ ID NO: 49) |
| | | | | NO: 3) | |
| AK435 | DNA516 | F8ScFv | PGSGS | AVNGTSQFT | EVQLLESGGGLVQPGGSLRLSCAASGFTFSL |
| | | Version1- | (SEQ ID | CFYNSRANI | FTMSVWRQAPGKGLEWVSAISGSGGSTYYA |
| | | Hole: | NO: 14) | SCVWSQDGA | DSVKGRFTISRDNSKNTLYLQMNSLRAEOT |
| | | hFc | | LQDTSCQVH | AVYYCAKSTHLYLFDYWGQGTLVTVSSGGG |
| | | (N297A)- | | AWPDRRRWN | GSGGGGSGGGGSEIVLTQSPGTLSLSPGER |
| | | hCD122 | | QTCELLPVS | ATLSCRASQSVSMPFLAWYQQKPGQAPRLL |
| | | | | QASWACNL | IYGASSRATGIPDRFSGSGSGTDFTLTISR |
| | | | | ILGAPDSQK | LEPEDFAVYYCQQMRGRPPTFGQGTKVEIK |
| | | | | LTTVDIVTL | GGSDKTHTCPPCPAPELLGGPSVFLFPPKP |
| | | | | RVLCREGV | KDTLMISRTPEVTCVVVDVSHEDPEVKFNW |
| | | | | RWRVM | YVDGVEVHNAKTKPREEQYASTYRWSVLTV |
| | | | | AIQDFKPFE | LHQDWLNGKEYKCKVSNKALPAPIEKTISK |
| | | | | NLRLMAPIS | AKGQPREPQVCTLPPSRDELTKNQVSLSCA |
| | | | | LQVVHVETH | VKGFYPSDIAVEWESNGQPENNYKTTPPVL |
| | | | | RCNI | DSDG5FFLVSKLTVDKSRWQQGNVFSCSVM |
| | | | | SWEISQASH | HEALHNHYTQKSLSLSPGPGSGSAVNGTSQ |
| | | | | YFERHLEFE | FTCFYNSRANISCVWSQDGALQDTSCQVHA |
| | | | | ARTLSPGHT | WPDRRRWNNQTCELLPVSQASWACNLILGA |
| | | | | WEEA | PDSQKLTYVDIVTLRVLCREGVRWRVMAIQ |
| | | | | PLLTLKQKQ | DFKPFENLRLMAPISLQVVHVETHRCNISW |
| | | | | EWICLETLT | EISQASHYFERHLEFEARTLSPGHTWEEAP |
| | | | | PDTQYEFQV | LLTLKQKQEWICLETLTPDTQYEFQVRVKP |
| | | | | RVKP | LQGEFTTWSPWSQPLAFRTKPAALGKD |
| | | | | LQGEFTTWS | (SEQ ID NO: 364) |
| | | | | PWSQPLAFR | |
| | | | | TKPAALGKD | |
| | | | | (SEQ ID | |
| | | | | NO: 4) | |
| AK436 | DNA187 | Hole: | | | DKTHTCPPCPAPELLGGPSVTLFPPKPKDTL |
| | | hFc(N297A)- | | | MISRTPEVTCVVVDVSHEDPEVKFNWYVDG |
| | | hCD122 | | | VEVHNAKTKPREEQYASTYRVVSVLTVLHQ |
| | | | | | DWLNGKEYKCKVSNKALPAPIEKTISKAKG |
| | | | | | QPREPQVCTLPPSRDELTKNQVSLSCAVKG |
| | | | | | FYPSQIAVEWESNGQPENNYKTTPPVLQSD |
| | | | | | GSFFLVSKLTVQKSRWQQGNVFSCSVMHEA |
| | | | | | LHNHYTQKSLSLSPGPGSGSAVNGTSQFTC |
| | | | | | FYNSRANISCVWSQDGALQDTSCQVHAWP0 |
| | | | | | RRRWNQTCEILPVSQASWACNLILGAPQSQ |
| | | | | | KLTTVDIVTLRVLCREGVRWRVMAIQDFKP |
| | | | | | FENLRLMAPISLQVVHVETHRCNISWEISQ |
| | | | | | ASHYFERHLEFEARTLSPGHTWEEAPLLTL |
| | | | | | KQKQFWICLETLTPDTQYEFQVRVKPLQGE |
| | | | | | FTTWSPWSQPLAFRTKPAALGKD(SEQ ID |
| | | | | | NO: 38) |
| AK436 | DNA542 | Knob: | | | DKTHTCPPCPAPELLGGPSVFLFPPKPKDTL |
| | | hFc | | | MISRTPEVTCVVVDVSHEDPEVKFNWYVDG |
| | | (N297A)- | | | VEVHNAKTKPREEQYASTYRVVSVLTVLHQ |
| | | hIL2 | | | DWLNGKEYKCKVSNKALPAPIEKTISKAKG |
| | | (R38A, | | | QPREPQVYTLPPCRDELTKNQVSLWCLVKG |
| | | F42A, | | | FYPSDIAVEWESNGQPENNYKTTPPVLDSO |
| | | Y45A, | | | GSFFLYSKLTVDKSRWQQGNVFSCSVMHEA |
| | | E62A, | | | LHNHYTQKSLSLSPGGISSGLLSGRSOQPS |
| | | C125A) | | | GPAPTSSSTKKTQLQLEHLLLQLQMILNGI |
| | | | | | NNYKNPKLTAMLTAKFAMPKKATELKHLQC |
| | | | | | LEEALKPLEEVLNLAQSKNFHLRPRDLISN |
| | | | | | INVIVLELKGSETTFMCEYAQETATIVEFI |
| | | | | | NRWTFAQSIISTLT |
| | | | | | (SEQ ID NO: 373) |
| AK437 | DNA187 | Hole: | | | DKTHTCPPCPAPELLGGPSVTLFPPKPKDTL |
| | | hFc | | | MISRTPEVTCVVVDVSHEDPEVKFNWYVDG |
| | | (N297A)- | | | VEVHNAKTKPREEQYASTYRVVSVLTVLHQ |
| | | hCD122 | | | DWLNGKEYKCKVSNKALPAPIEKTISKAKG |
| | | | | | QPREPQVCTLPPSRDELTKNQVSLSCAVKG |
| | | | | | FYPSQIAVEWESNGQPENNYKTTPPVLQSD |
| | | | | | GSFFLVSKLTVQKSRWQQGNVFSCSVMHEA |
| | | | | | LHNHYTQKSLSLSPGPGSGSAVNGTSQFTC |
| | | | | | FYNSRANISCVWSQDGALQDTSCQVHAWP0 |
| | | | | | RRRWNQTCEILPVSQASWACNLILGAPQSQ |
| | | | | | KLTTVDIVTLRVLCREGVRWRVMAIQDFKP |
| | | | | | FENLRLMAPISLQVVHVETHRCNISWEISQ |
| | | | | | ASHYFERHLEFEARTLSPGHTWEEAPLLTL |
| | | | | | KQKQFWICLETLTPDTQYEFQVRVKPLQGE |
| | | | | | FTTWSPWSQPLAFRTKPAALGKD(SEQ ID |
| | | | | | NO: 38) |
| AK437 | DNA545 | Knob: | | | DKTHTCPPCPAPELLGGPSVFLFPPKPKDTL |
| | | hFc | | | MISRTPEVTCVVVDVSHEDPEVKFNWYVDG |
| | | (N297A)- | | | VEVHNAKTKPREEQYASTYRVVSVLTVLHQ |
| | | hIL2 | | | PWLNGKEYKCKVSNKALPAPIEKHSKAKGQ |
| | | (R38A, | | | PRGPQVYTIPPCRDELTKNQVSLWCIVKGF |
| | | F42A, | | | YPSDIAVEWESNGQPENNYKTTPPVLDSDG |
| | | Y45A, | | | SFFLYSKLTVDKSRWQQGNVFSCSVMHEAL |
| | | E62A, | | | HNHYTQKSLSLSPGGISSGLLSGRSSGPAP |
| | | C125A) | | | TSSSTKKTQLQLEHLLLDLQMILNGINNYK |
| | | | | | NPKLTAMLTAKFAMPKKATELKHLQCLEEA |
| | | | | | LKPLEEVLNLAQSKNFHLRPRDLISNINVI |
| | | | | | VLELKGSETTFMCEYADETATIVEFLNRWI |
| | | | | | TFAQSIISTLT(SEQ ID NO: 376) |
| AK438 | DNA255 | Knob: | | | DKTHTCPPCPAPELLGGPSVFLFPPKPKDT |
| | | hFc | | | LMISRTPEVTCVVVDVSHEDPEVKFNWYVD |
| | | (N297A)- | | | GVEVHNAKTKPREEQYASTYRVVSVLTVLH |
| | | hIL2 | | | QDWLNGKEYKCKVSNKALPAPIEKTISKAK |
| | | (R38A, | | | GQPREPQVYTLPPCRDELTKNQVSLWCLVK |
| | | F42A, | | | GFYPSDIAVEWESMGQPENNYKTTPPVLDS |
| | | Y45A, | | | DGSFFLYSKLTVDKSRWQQGNVFSCSVMHE |
| | | E62A, | | | ALHNHYTQKSLSLSPGGGSSPPGGGSSGGG |
| | | C125A) | | | SGPAPTSSSTKKTQLQLEHLLLDLQMILNG |
| | | | | | INNYKNPKLTAMLTAKFAMPKKATELKHLQ |
| | | | | | CLEEALKPLEEVLNLAQSKNFHLRPRDLISN |
| | | | | | INVIVLELKGSETTFMCEYADETATIVEFL |
| | | | | | NRWITFAQSIISTLT |
| | | | | | (SEQ ID NO: 51) |
| AK438 | DNA543 | Hole: | GSGGG | AVNGTSQFT | DKTHTCPPCPAPELLGGPSVFLFPPKPKDT |
| | | hFc(N297A)- | (SEQ ID | CFYNSRANI | LMISRTPEVTCVVVDVSHEDPEVKFNWYVD |
| | | [VPLSLY] | NO: 31) | SCVWSQDGA | GVEVHNAKTKPREEQYASTYRWSVLTVLHQ |
| | | HCD122 | | LQDTSCQVH | DWINGKEYKCKVSNKALPAPIEKTISKAKG |
| | | | | AWPDRRRWN | QPREPQVCTLPPSRDELTKNQ |
| | | | | QTCELLPVS | VSLSCAVKGFYPSDIAVEWESNGQPENNYK |
| | | | | QASWACNL | TTPPVLDSDGSFFLVSKLTVDKSRWQQGNV |
| | | | | ILGAPDSQK | FSCSVMHEALHNHYTQKSLSLSPGGPPSGS |
| | | | | LTTVDIVTL | SPGVPLSLYGSGGGAVNGTSQFTCFYNSRA |
| | | | | RVLCREGV | NISCVWSQDGALQDTSCQVHAWPDRRRWNQ |
| | | | | RWRVM | TCELLPVSQASWACNLILGAPDSQKLTTVD |
| | | | | AIQDFKPFE | IVTLRVLCREGVRWRVMAIQDFKPFENLRL |
| | | | | NLRLMAPIS | MAPISLQVVHVETHRCNISWEISQASHYFER |
| | | | | LQVVHVETH | HLEFEARTLSPGHTWEEAPLLTLKQKQEWI |
| | | | | RCNI | CLETLTPDTQYEFQVRVKPLQGEFTTWSPW |
| | | | | SWEISQASH | SQPLAFRTKPAALGKD |
| | | | | YFERHLEFE | (SEQ ID NO: 42) |
| | | | | ARTLSPGHT | |
| | | | | WEEA | |
| | | | | PLLTLKQKQ | |
| | | | | EWICLETLT | |
| | | | | PDTQYEFQV | |
| | | | | RVKP | |
| | | | | LQGEFTTWS | |
| | | | | PWSQPLAFR | |
| | | | | TKPAALGKD | |
| | | | | (SEQ ID | |
| | | | | NO: 4) | |
| AK439 | DNA158 | Hole: | | | DKTHTCPPCPAPELLGGPSVFLFPPKPKDTL |
| | | hFc(N297A) | | | MISRTPEVTCVVVDVSHEDPEVKFNWYVDGV |
| | | | | | EVHNAKTKPREEQYASTYRVVSVLTVLHQDW |
| | | | | | LNGKEYKCKVSNKALPAPIEKTISKAKGQPR |
| | | | | | EPQVCTLPPSRDELTKNQVSLSCAVKGFYPS |
| | | | | | DIAVEWESNGQPENNYKTTPPVLDSDGSFFL |
| | | | | | VSKLTVDKSRWQQGMVFSCSVMHEALHNHY |
| | | | | | TQKSLSLSPG |
| | | | | | (SEQ ID NO: 9) |
| AK439 | DNA544 | | SGP | APTSSSTKKTQL | DKTHTCPPCPAPELLGGPSVFLFPPKPKDT |
| | | Knob: | (SEQ ID | QLEHLLLDLQMI | LMISRTPEVTCVVVDVSHEDPEVKFNWYVD |
| | | hFc(N297A)- | NO: 29) | LNGINNYKNPKL | GVEVHNAHTKPREEQYASTYRVV5VLTVLH |
| | | [VPLSLY]- | | TAMLTAKFAMP | QDWLNGKEYKCKVSNKALPAPIEKTISKAK |
| | | hIL2 | | KKATELKHLQCL | GQPREPQVYTLPPCRDELTKNQVSLWCLVK |
| | | (R38A, | | EEALKPLEEVLN | GFYPSDIAVEWESNGQPENNYKTTPPVLDS |
| | | F42A, | | LAQSKNFHFDP | DGSFFLYSKLTVOKSRWQQGNVFSCSVMHE |
| | | Y45A, | | RDWSNIMVFVL | ALHNHYTQKSLSISPGGSPGVPLSLYSGPA |
| | | E62A, | | SIKGSETTFMCE | PTSSSTKKTQLQLEHLLLDLQMIING1NNY |
| | | L80F, | | YADETATIVEFL | KNPKLTAMLTAKFAMPKKATELKHLQCLEE |
| | | R81D, | | NRWITFAQSII | ALKPLEEVLNLAQSKNFHFDPRDWSNINVF |
| | | L85V, | | STIT | VLELKGSETTFMCEYADETATIVEFLNRWI |
| | | 185V, | | (SEQ ID | TFAQSIISTLT |
| | | I92F, | | NO: 328) | (SEQ ID NO: 375) |
| | | C125A) | | | |
| AK440 | DNA187 | Hole: | | | DKTHTCPPCPAPELLGGPSVFLFPPKPKDT |
| | | hFc(N297A)- | | | LMISRTPEVTCVVVDVSHEDPEVKFNWYVD |
| | | hCD122 | | | GVEVHNAKTKPREEQYASTYRWSVLTVLHQ |
| | | | | | DWLNGKEYKCKVSNKALPAPIEKTISKAKG |
| | | | | | QPREPQVCTLPPSRDELTKNQVSLSCAVKG |
| | | | | | FYPSDIAVEWESNGQPENNYKTTPPVLDSD |
| | | | | | GSFFLVSKLTVDKSRWQQGNVFSCSVMHEA |
| | | | | | LHNHYTQKSLSLSPGP6SGSAVNGTSQFTC |
| | | | | | FYNSRANISCVWSQDGALQDTSCQVHAWPD |
| | | | | | RRRWNQTCELLPVSQASWACNLILGAPDSQK |
| | | | | | LTTVDIVTLRVLCREGVRWRVMAIQDFKPF |
| | | | | | ENLRLMAPISLQVVHVETHRCNISWEISQAS |
| | | | | | HYFERHLEFEARTLSPGHTWEEAPLLTLKQ |
| | | | | | KQEWICLETLTPDTQYEFQVRVKPLQGEFT |
| | | | | | TWSPWSQPLAFRTKPAALGKD |
| | | | | | (SEQ ID NO: 38) |
| AK440 | DNA544 | | SGP | APTSSSTKKTQL | DKTHTCPPCPAPELLGGPSVFLFPPKPKDT |
| | | Knob: | (SEQ ID NO: 29) | QLEHLLLDLQMI | LMISRTPEVTCVVVDVSHEDPEVKFNWYVD |
| | | hFc(N297A)- | | LNGINNYKNPKL | GVEVHNAHTKPREEQYASTYRVV5VLTVLH |
| | | [VPLSLY]- | | TAMLTAKFAMP | QDWLNGKEYKCKVSNKALPAPIEKTISKAK |
| | | hIL2 | | KKATELKHLQCL | GQPREPQVYTLPPCRDELTKNQVSLWCLVK |
| | | (R38A, | | EEALKPLEEVLN | GFYPSDIAVEWESNGQPENNYKTTPPVLDS |
| | | F42A, | | LAQSKNFHFDP | DGSFFLYSKLTVOKSRWQQGNVFSCSVMHE |
| | | Y45A, | | RDWSNIMVFVL | ALHNHYTQKSLSISPGGSPGVPLSLYSGPA |
| | | E62A, | | SIKGSETTFMCE | PTSSSTKKTQLQLEHLLLDLQMIING1NNY |
| | | L80F, | | YADETATIVEFL | KNPKLTAMLTAKFAMPKKATELKHLQCLEE |
| | | R81D, | | NRWITFAQSII | ALKPLEEVLNLAQSKNFHFDPRDWSNINVF |
| | | L85V, | | STIT | VLELKGSETTFMCEYADETATIVEFLNRWI |
| | | 185V, | | (SEQ ID | TFAQSIISTLT |
| | | I92F, | | NO: 328) | (SEQ ID NO: 375) |
| | | C125A) | | | |
| AK441 | DNA543 | Hole: hFc(N297A)- | GSGGG | AVNGTSQFT | DKTHTCPPCPAPELLGGPSVFLFPPKPKDTL |
| | | [VPLSLY]- | (SEQ ID | CFYNSRANI | MISRTPEVTCVVVDVSHEDPEVKFNWYVDG |
| | | hCD122 | No: 31) | SCVWSQDGA | VEVHNAKTKPREEQYASTYRVVSVLTVLHQ |
| | | | | LQDTSCQVH | DWLNGKEYKCKVSNKALPAPIEKTISKAKG |
| | | | | AWPDRRRWN | QPREPQVCTLPPSRDELTKNQVSLSCAVKG |
| | | | | QTCELLPVS | FYPSDIAVEWESNGQPENMYKTTPPVLDSD |
| | | | | QASWACNL | GSFFLVSKLTVDKSRWQQGNVFSCSVMHEA |
| | | | | ILGAPDSQK | LHNHYTQKSLSLSPGGPPSGSSPGVPLSLY |
| | | | | LTTVDIVTL | GSGGGAVNGTSQFTCFYNSRANISCVWSQD |
| | | | | RVLCREGV | GALQDTSCQVHAWPDRRRWNQTCELLPVSQ |
| | | | | RWRVM | ASWACNLILGAPDSQKLTTVDIVTLRVLCR |
| | | | | AIQDFKPFE | EGVRWRVMAIQDFKPFENLRLMAPISLQVV |
| | | | | NLRLMAPIS | HVETHRCNISWEISQASHYFERHLEFEART |
| | | | | LQVVHVETH | LSPGHTWEEAPLLTLKQKQEWICLETLTPD |
| | | | | RCNI | TQYEFQVRVKPLQGEFTTWSPWSQPLAFRT |
| | | | | SWEISQASH | KPAALGKD (SEQ ID NO: 42) |
| | | | | YFERHLEFE | |
| | | | | ARTLSPGHT | |
| | | | | WEEA | |
| | | | | PLLTLKQKQ | |
| | | | | EWICLETLT | |
| | | | | PDTQYEFQV | |
| | | | | RVKP | |
| | | | | LQGEFTTWS | |
| | | | | PWSQPLAFR | |
| | | | | TKPAALGKD | |
| | | | | (SEQ ID | |
| | | | | NO: 4) | |
| AK441 | DNA546 | Knob: | | | |
| | | hFc | | | DKTHTCPPCPAPELLGGPSVFLFPPKPKDT |
| | | (N297A)- | | | LMISRTPEVTCVVVDVSHEDPEVKFNWYV |
| | | hIL2 | | | DGVEVHNAKTKPREEQYASTYRWSVLTVLH |
| | | (R3SA, | | | QDWINGKEYKCKVSNKALPAPIEKTISKAK |
| | | F42A, | | | GQPREPQVYTLPPCRDELTKNQVSLWCLVK |
| | | Y45A, | | | GFYPSDIAVEWESNGQPENNYKTTPPVLDS |
| | | E62A, | | | DGSFFLYSKLTVQKSRWQQGNVFSCSVMHE |
| | | L30F, | | | ALHNHYTQKSLSLSPGGGSSPPGGGSSGG |
| | | R81D, | | | GSGPAPTSSSTKKTQLQLEHLLLDLQMILN |
| | | I85V, | | | GINNYKNPKLTAMLTAKFAMPKKATELKH |
| | | I86V, | | | LQCLEEALKPLEEVLNLAQSKNFHFDPRDV |
| | | I32F, | | | VSNINVFVLELKGSETTFMCEYADETATIV |
| | | C125A) | | | EFLNRWITFAQSHSTLT |
| | | | | | (SEQ ID NO: 377) |
| AK442 | DNA255 | Knob: | | | DKTHTCPPCPAPELLGGPSVFLFPPKPKBTL |
| | | hFc(N297A)- | | | MISRTPEVTCWVDVSHEQPEVKFNWYVDGV |
| | | hIL2(R33A, | | | EVHNAKTKPREEQYASTYRVVSVLTVLHQD |
| | | F42A, | | | WLNGKEYKCKVSNKALPAPIEKTISKAKGQ |
| | | Y45A, | | | PREPQVYTLPPCRDELTKNQVSLWCLVKGF |
| | | E62A, | | | YPSDIAVEWESNIGQPENNYKTTPPVLDSD |
| | | C125A) | | | GSFFLYSKLTVDKSRWQQGNVFSCSVMHEA |
| | | | | | LHNHYTQKSLSLSPGGGSSPPGGGSSGGGS |
| | | | | | GPAPTSSSTKKTQLQLEHLLLDLQMILNGI |
| | | | | | NNYKNPKLTAMLTAKFAMPKKATELKHLQC |
| | | | | | LEEALKPLEEVLNLAQSKNFHLRPRDLISN |
| | | | | | INVIVLELKGSETTFMCEYADETATIVEFL |
| | | | | | NRWITFAQSIISTLT(SEQ ID NO: 51) |
| AK442 | DNA553 | Hole: | SGGG | AVNGTSQFT | DKTHTCPPCPAPELLGGPSVFLFPPKPKDTL |
| | | hFc(N297A)- | (SEQ ID | CFYNSRANI | MISRTPEVTCVVVDVSHEDPEVKFNWYVDG |
| | | [DSGGFMLT]- | NO: 30) | SCVWSQDGA | VEVHNAKTKPRFEQYASTYRVVSVLTVLHQ |
| | | hCD122 | | LQDTSCQVH | DWLNGKEYKCKVSNKALPAPIEKTISKAKG |
| | | | | AWPDRRRWN | QPREPQVCTLPPSRDELTKNQVSLSCAVKG |
| | | | | QTCELLPVS | FYPSDIAVEWESNGQPENNYKTTRPVLDSD |
| | | | | QASWACNL | GSFFLVSKLTVDKSRWQQGNVFSCSVMHEA |
| | | | | ILGAPDSQK | LHNHYTQKSLSLSPGGPPSGSSPGDSGGFM |
| | | | | LTTVDIVTL | LTSGGGAVNGTSQFTCFYNSRANISCVWSQ |
| | | | | RVLCREGV | DGALQDTSCQVHAWPDRRRWNQTCELLPVS |
| | | | | RWRVM | QASWACNLILGAPDSQKLTTVDIVTLRVLC |
| | | | | AIQDFKPFE | REGVRWRVMAIQDFKPFENLRLMAPISLQW |
| | | | | NLRLMAPIS | HVETHRCNISWEISQASHYFERHLEFEART |
| | | | | LQVVHVETH | LSPGHTWEEAPLLTLKQKQEWICLETLTPD |
| | | | | RCNI | TQYEFQVRVKPLQGEFTTWSPWSQPLAFRT |
| | | | | SWEISQASH | KPAALGKD (SEQ ID NO: 41) |
| | | | | YFERHLEFE | |
| | | | | ARTLSPGHT | |
| | | | | WEEA | |
| | | | | PLLTLKQKQ | |
| | | | | EWICLETLT | |
| | | | | PDTQYEFQV | |
| | | | | RVKP | |
| | | | | LQGEFTTWS | |
| | | | | PWSQPLAFR | |
| | | | | TKPAALGKD | |
| | | | | (SEQ ID | |
| | | | | NO: 4) | |
| AK443 | DNA187 | Hole: | | | DKTHTCPPCPAPELLGGPSVFLFPPKPKDT |
| | | hFc(N297A)- | | | LMISRTPEVTCVVVDVSHEDPEVKFNWYVD |
| | | hCD122 | | | GVEVHNAKTKPREEQYASTYRWSVLTVLHQ |
| | | | | | DWLNGKEYKCKVSNKALPAPIEKTISKAKG |
| | | | | | QPREPQVCTLPPSRDELTKNQVSLSCAVKG |
| | | | | | FYPSDIAVEWESNGQPENNYKTTPPVLDSD |
| | | | | | GSFFLVSKLTVDKSRWQQGNVFSCSVMHEA |
| | | | | | LHNHYTQKSLSLSPGP6SGSAVNGTSQFTC |
| | | | | | FYNSRANISCVWSQDGALQDTSCQVHAWPD |
| | | | | | RRRWNQTCELLPVSQASWACNLILGAPDSQK |
| | | | | | LTTVDIVTLRVLCREGVRWRVMAIQDFKPF |
| | | | | | ENLRLMAPISLQVVHVETHRCNISWEISQAS |
| | | | | | HYFERHLEFEARTLSPGHTWEEAPLLTLKQ |
| | | | | | KQEWICLETLTPDTQYEFQVRVKPLQGEFT |
| | | | | | TWSPWSQPLAFRTKPAALGKD |
| | | | | | (SEQ ID NO: 38) |
| AK443 | DNA554 | Knob: | SGP | APTSSSTKKTQL | DKTHTCPPCPAPELLGGPSVFLFPPKPKDT |
| | | hFc | (SEQ ID | QLRHLCLRLQMI | LMISRTPEVTCVVVDVSHEDPEVKFNWYVD |
| | | (N297A)- | NO: 29) | LNGSNNYKNPKL | GVEVHNAKTKPREEQYASTYRVVSVLTVLH |
| | | [VPLSLY]- | | TAMLTAKFAMP | QDWLNGKEYKCKVSNKALP |
| | | hIL2 | | KKATELKHLQCL | APIEKHSKAKGQPREPQVYTLPPCRDELTK |
| | | (E15R, | | EEALKPLEEVLN | NQVSLWCLVKGFYPSDIAVEWESNGQPENN |
| | | L18C, | | LAQSKNFHLRPR | YKTTPPVLDSDGSFFLYSKLTVDKSRW |
| | | D20R, | | DLISNINVLEL | QQGNVFSCSVMHEALHNHYTQQKSLSLSPG |
| | | R38A, | | KGSETTFMCEY | GSPGVPLSLYSGPAPTSSSTKKTQLQLRHL |
| | | F42A, | | ADETATIVEFLN | CLRLQMILNGINNYKNPKLTAMLTAKFAMP |
| | | Y45A, | | RWITFCQSIIST | KKATELKHLQCLEEALKPLEEVLNLAQSKN |
| | | E62A) | | LT | FHLRPRDLISNINVIVLELKGSETTFMCEY |
| | | | | (SEQ ID | ADETATIVERNRWITFCQSIISTLT |
| | | | | NO: 339) | (SEQ ID NO: 385) |
| AK444 | DNA281 | Knob: | SGP | APTSSSTKKTQL | DKTHTCPPCPAPELLGGPSVFLFPPKPKDT |
| | | hFc(N297A), | (SEQ ID | QLEHLLLDLQMI | IMISRTPEVTCVVVDVSHEDPEVKFNWYVD |
| | | [DSGGFMLT]- | NO: 29) | LNGINNYKNPKL | GVEVHNAKTKPREEQYASTYRVVSVLTVLH |
| | | hIL2 | | TAMLTAKFAMP | QDWLNGKEYKCKVSNKALPAPIEKHSKAKG |
| | | (R38A, | | KKATELKHLQCL | QPREPQVYTLPPCRDELTKNQVSLWCLVKG |
| | | F42A, | | EEALKPLEEVLN | FYPSDIAVEWESNGQPENNYKTTPPVLDSD |
| | | Y45A, | | LAQSKNFHLRPR | GSFFLYSKLTVDKSRWQQGNVFSCSVMHEA |
| | | E62A, | | DLISNINVIVL | LHNHYTQKSLSLSPGGSGPDSGGFMLTSGP |
| | | Cl25A) | | ELKGSETTFMC | APTSSSTKKTQLQIEHLLLDLQMILNGINN |
| | | | | EYADETATIVEF | YKNPKLTAMLTAKFAMPKKATELKHLQCLE |
| | | | | LNRWITFAQSII | EALKPLEEVLNLAQSKNFHLRPRDLISNIN |
| | | | | STLT | VIVLELKGSETTFMCEYADETAnVEFLNRW |
| | | | | (SEQ ID | ITFAQSIISTLT (SEQ ID NO: 48) |
| | | | | NO: 3) | |
| AK444 | DNA440 | Hole: | | | DKTHTCPPCPAPELLGGPSVFLFPPKPKDT |
| | | hFc | | | LMISRTPEVTCVVVDVSHEDPEVKFNWYVD |
| | | (N297A)- | | | GVEVHNAKTKPRGEQYASTYRVVSVLTVLH |
| | | hCD122 | | | QDWLNGKEYKCKV |
| | | (C122S, | | | SNKALPAPIEKTISKAKGQPREPQVCTLPP |
| | | C168S) | | | SRDELTKNQVSLSCAVKGFYPSDIAVEVVE |
| | | | | | SNGQPENNYKTTPPVLDSDGSFFLVSKLTV |
| | | | | | DKSRWQQGNVFSCSVMHEALHNHYTQKSLS |
| | | | | | LSPGPGSGSAVNGTSQFTCFYNSRANISCV |
| | | | | | WSQDGALQDTSCQVHAWPORRRWNQTCELL |
| | | | | | PVSQASWACNLILGAPDSQKLTTVDIVTLR |
| | | | | | VLCREGVRWRVMAIQDFKPFENLRLMAPIS |
| | | | | | LQVVHVETHRSNISWEISQASHYFERHLEFE |
| | | | | | ARTLSPGHTWEEAPLLTLKQKQEWISLETL |
| | | | | | TPDTQYEFQVRVKPLQGEFTTVVSPWSQPL |
| | | | | | AFRTKPAALGKD (SEQ ID NO: 39) |
| AK449 | DNA547 | Hole: | | | EPKSSDKTHTCPPCPAPELLGGPSV |
| | | hFcIgG1 | | | FLFPPKPKDTLMISRTPEVTCVVVD |
| | | (N29 | | | VSHEDPEVKFNWYVDGVEVHNAKTK |
| | | 7A + EPKSS)- | | | PREEQYASTYRVVSVLTVLHQDWLN |
| | | Hole: | | | GKEYKCKVSNKALPAPIEKTISKAK |
| | | hFc | | | GQPREPQVCLPPSRDELTKNQVSLS |
| | | (N297A)- | | | CAVKGFYPSDIAVEWESNGQPENNY |
| | | hCD122 | | | KTTPPVLDSDGSFFLVSKLTVCKSR |
| | | | | | WQQGNVFSCSVMHEALHNHYTQKSL |
| | | | | | SLSPGPGSGSAVNGTSQFTCFYMSR |
| | | | | | ANISCVWSQDGALQDTSCQVHAWPD |
| | | | | | RRRWNQTCELLPVSQASWACNLILG |
| | | | | | APDSQKLTTVDIVTLRVLCREGVRW |
| | | | | | RVMAIQDFKPFENLRLMAPISLQVVH |
| | | | | | VETHRCNISWEISQASHYFERHLEF |
| | | | | | EARTLSPGHTWEEAPLLTLKQKQEW |
| | | | | | ICLETLTPDTQYEFQVRVKPLQGEF |
| | | | | | FTWSPWSQPLAFRTKPAALGKD |
| | | | | | (SEQ ID NO: 378) |
| AK449 | DNA550 | Knob: | SGP | APTSSSTKKTQL | EPKSSDKTHTCPPCPAPELLGGPVF |
| | | hFcIgG1 | (SEQ | QLEHLLLDLQMI | LFPPKPKDTLMISRTPEVTCVVVDV |
| | | (N29 | ID | LNGINNYKNPKL | SHEDPEVKFNWY |
| | | 7A + EPKSS)- | NO: 29) | TAMLTAKFAMP | VDGVEVHNAKTKPREEQYASTFYRV |
| | | hIL2 | | KKATELKHLQCL | VSVLTVLHQDWLNGKEYKCKVSNKA |
| | | (R38A, | | EEALKPLEEVLN | LPAPIEKTISKAKGQPREPQVYTLP |
| | | F42A, | | LAQSKNFHLRPR | PCRDELTKNQVSLWCLVKGFYPSDI |
| | | Y45A, | | DLISNINVIVLEL | AVEWESNGQPENNYKTTPPVLDSDG |
| | | E62A, | | KGSETTFMCEY | SFFLYSKLTVDKSRWQQGNVFSCSV |
| | | C125A) | | ADETATIVEFLN | MHEALHNHYTQKSLSLSPGGSPGVP |
| | | | | RWITFAQSIISTL | LSLYSGPAPTSSSTKKTQLQLEHLL |
| | | | | T | LDLQMILNGINNYKNPKLTAMLTAK |
| | | | | (SEQ ID | FAMPKKATELKHLQCLEEALKPLEE |
| | | | | NO: 3) | VLNLAQSKNFHLRPRDLISNINVIV |
| | | | | | LELKGSETTFMCEYADETATIVEFL |
| | | | | | NRWITFAQSIISTLT |
| | | | | | (SEQ ID NO: 381) |
| AK449 | DNA548 | Hole: | | | AKTDKTHTCPPCPAPELLGGPSVFL |
| | | hFcIgG1 | | | FPPKPKDTLMISRTPEVTCVVVDVS |
| | | (N29 | | | HEDPEVKFNWYVDGVEVHNAKTKPR |
| | | 7A + AKT)- | | | EEQYASTYRVVSVLTVLHQDWLNGK |
| | | Hole: | | | EYKCKVSNKALPAPIEKTISKAKGQ |
| | | hFc | | | PREPQVCTLPPSRDELTKNQVSLSC |
| | | (N297A)- | | | AVKGFYPSDIAVEWESNGQPENNYK |
| | | hCD122 | | | TTPPVLDSDGSFFLVSKLTVDKSRW |
| | | | | | QQGNVFSCSVMHEALHNHYTQKSLS |
| | | | | | LSPGPGSGSAVNGTSQFTCFYNSRA |
| | | | | | NISCVWSQDGALQDTSCQVHAWPDR |
| | | | | | RRWNQTCELLPVSQASWACNLILGA |
| | | | | | PDSQKLTTVDIVTLRVLCREGVRWR |
| | | | | | VMAIQDFKPFENLRLMAPISLQVVH |
| | | | | | VETHRCNISWEISQASHYFERHLEF |
| | | | | | EARTLSPGHTWEEAPLLTLKQKQEW |
| | | | | | ICLETLTPDTQYEFQVRVKPLQGEF |
| | | | | | TTWSPWSQPLAFRTKPAALGKD |
| | | | | | (SEQ ID NO: 379) |
| AK450 | DNA551 | Knob: | SGP | APTSSSTKKTQL | AKTDKTHTCPPCPAPELLGGPSVFL |
| | | hFcIgG1 | (SEQ | QLEHLLLDLQMI | FPPKPKDTLMISRTPEVTCVVVDVS |
| | | (N29 | ID | LNGINNYKNPKL | HEDPEVKFNWYVDGVEVHNAKTRPR |
| | | 7A + | NO: 29) | TAMLTAKFAMP | EEQYASTYRVVSVLTVLHQDWLNGK |
| | | AKT)- | | KKATELKHLQCL | EVKCKVSNKALPAPIEKTISKAKGQ |
| | | [VPLSLY]- | | EEALKPLEEVLN | PREPQVYTLPPCRDELTKNQVSLWC |
| | | hIL2 | | LAQSKNFHLRPR | LVKGFYPSDIAVEWESNGQPENNYK |
| | | (R38A, | | DLISNINVIVLEL | TTPPVLDSDQSFFLYSKLTVDKSRW |
| | | F42A, | | KGSETTFMCEY | QQGIWFSCSVMHEALHNHYTQKSLS |
| | | Y45A, | | ADETATIVEFLN | LSPGGSPGVPLSLYSGPAPTSSSTK |
| | | E62A, | | RWITFAQSIISTL | KTQLQLEHLLLDLQMILNGINNYKN |
| | | C125A) | | T | PKLTAMLTAKFAMPKKATELKHLQC |
| | | | | (SEQ ID | LEEALKPLEEVLNLAQSKNFHLRPR |
| | | | | NO: 3) | DLISNINVIVLELKGSETTFMCEYA |
| | | | | | DETATIVEFLNRWITFAQSIISTLT |
| | | | | | (SEQ ID NO: 382) |
| AK451 | DNA549 | Knob: | | | AKTEPKSSDKTHTCPPCPAPELLGG |
| | | hFcIgG1 | | | PSVFLFPPKPKDTLMISRTPEVTCV |
| | | (N29 | | | VVDVSHEDPEVKFNWYVDGVEVHNA |
| | | 7A + | | | KTKPREEQYASTYRVVSVLTVLHQD |
| | | AKTEPKSS)- | | | WLNGKEYKCKVSNKALPAPIEKTIS |
| | | hCD122 | | | KAKGQPREPQVCTLPPSRDEITKNQ |
| | | | | | VSLSCAVKGFYPSDIAVEWESNGQP |
| | | | | | ENNYKTTPPVLDSDGSFFLVSKLTV |
| | | | | | DKSRWQQGNVFSCSVMHEALHNHYT |
| | | | | | QKSLSLSPGPGSGSAVNGTSQFTCF |
| | | | | | YNSRANISCVWSQDGALQPTSCQVH |
| | | | | | AWPDRRRWNQTCELLPVSQASWACN |
| | | | | | LILGAPDSQKLTTVDIVTLRVLCRE |
| | | | | | GVRWRVMAIQDFKPFENLRLMAPIS |
| | | | | | LQVVHVETHRCNISWEISQASHYFER |
| | | | | | HLEFEARTLSPGHTWEEAPLLTLKQ |
| | | | | | KQEWICLETLTPDTQYEFQVRVKPL |
| | | | | | QGEFTTWSPWSQPLAFRTKPAALGK |
| | | | | | D (SEQ ID NO: 380) |
| AK451 | DNA552 | Knob: | SGP | APTSSSTKKTQL | AICTEPKSSDKTHTCPPCPAPELLG |
| | | hFcIgG1 | (SEQ | QLEHLLLDLQMI | GPSVFLFPPKPKDTLMISRTPEVTC |
| | | (N29 | ID | LNGINNYKNPKL | VVVDVSHEDPEVKFNWYVDGVEVHN |
| | | 7A + | NO: 29) | TAMLTAKFAMP | AKTKPREEQYASTYRVVSVLTVLHQ |
| | | AKTEPKSS)- | | KKATELKHLQCL | DWLNGKEYKCKVSNKALPAPIEKLIS |
| | | [VPLSLY]- | | EEALKPLEEVLN | KAKGQPREPQVYTLPPCRDELTKNQ |
| | | hIL2 | | LAQSKNFHLRPR | VSLWCLVKGFYPSDIAVEWESNGQP |
| | | (R38A, | | DLISNINVIVLEL | ENNYKTTPPVLDSDGSFFLYSKLTV |
| | | F42A, | | KGSETTFMCEY | DKSRWQQSNVFSCSVMHEALHNHYT |
| | | Y45A, | | ADETATIVEFLN | QKSLSLSPGGSPGVPLSLYSGPAPT |
| | | E62A, | | RWITFAQSIISTL | SSSTKKTQLQLEHLLLDLQMILNGI |
| | | C125A) | | T | NNYKNPKLTAMLTAKFAMPKKATEL |
| | | | | (SEQ ID | KHLQCLEEALKPLEEVLNLAQSKNF |
| | | | | NO: 3) | HLRPRDLISNINVIVLELKGSETTF |
| | | | | | MCEYADETATIVEFLNRWITFAQSI |
| | | | | | STLT(SEQ ID NO: 383) |
| AK452 | DNA187 | Hole: | | | DKTHTCPPCPAPELLGGPSVFLFPPKPKDT |
| | | hFc(N297A)- | | | LMISRTPEVTCVVVDVSHEDPEVKFNWYVD |
| | | hCD122 | | | GVEVHNAKTKPREEQYASTYRWSVLTVLHQ |
| | | | | | DWLNGKEYKCKVSNKALPAPIEKTISKAKG |
| | | | | | QPREPQVCTLPPSRDELTKNQVSLSCAVKG |
| | | | | | FYPSDIAVEWESNGQPENNYKTTPPVLDSD |
| | | | | | GSFFLVSKLTVDKSRWQQGNVFSCSVMHEA |
| | | | | | LHNHYTQKSLSLSPGPGSGSAVNGTSQFTC |
| | | | | | FYNSRANISCVWSQDGALQDTSCQVHAWPD |
| | | | | | RRRWNQTCELLPVSQASWACNLILGAPDSQK |
| | | | | | LTTVDIVTLRVLCREGVRWRVMAIQDFKPF |
| | | | | | ENLRLMAPISLQVVHVETHRCNISWEISQAS |
| | | | | | HYFERHLEFEARTLSPGHTWEEAPLLTLKQ |
| | | | | | KQEWICLETLTPDTQYEFQVRVKPLQGEFT |
| | | | | | TWSPWSQPLAFRTKPAALGKD |
| | | | | | (SEQ ID NO: 38) |
| AK452 | DNA563 | Knob: | SGP | APTSSSTKKTQL | DKTHTCPPCPAPELLGGPSVFLFPPK |
| | | hFc | (SEQ | QLRHLCLRLQMI | PKDTLMISRTPEVTCVVVDVSHEDP |
| | | (N297A) | ID | LNGINNYKNPKL | EVKFNWYVDGVEVHNAKTKPREEQY |
| | | [VPLSLY]- | NO: 29) | TAMLTAKFAMP | ASTYRVVSVLWLHQDWLNGKEYKCK |
| | | hIL2 | | KKATELKHLQCL | VSNKALPAPIEKTISKAKGQPREPQ |
| | | (R38A, | | EEALKPLEEVLN | VYTLPPCRDELTKNQVSLWCLVKGF |
| | | F42A, | | LAQSKNFHLRPR | YPSDIAVEWESNGQPENNYKTTPPV |
| | | Y45A, | | DLISLINVIVLE | IDSDGSFFLYSKLWDKSRVYQQGNV |
| | | E62A, | | LKGSETTFMCEY | FSCSVMHEALHNHYTQKSLSLSPGG |
| | | C125A) | | ADETATIVEFLN | SPGVPLSLYSGPAPTSSSTKKTQLQ |
| | | | | RWITFCQSIIST | LRMLCLRLQMILNGINNYKNPKLTA |
| | | | | LT | MLTAKFAMPKKATELKHLQCLEEAL |
| | | | | (SEQ ID | KPLEEVLNLAQSKNFHLRPRDLISL |
| | | | | NO: 340) | INVIVLELKGSETTFMCEYAOETAT |
| | | | | | IVEFLNRWITFCQSIISTLT |
| | | | | | (SEQ ID NO: 386) |
| AK453 | DNA187 | Hole: | | | DKTHTCPPCPAPELLGGPSVFLFPPKPKDT |
| | | hFc(N297A)- | | | LMISRTPEVTCVVVDVSHEDPEVKFNWYVD |
| | | hCD122 | | | GVEVHNAKTKPREEQYASTYRWSVLTVLHQ |
| | | | | | DWLNGKEYKCKVSNKALPAPIEKTISKAKG |
| | | | | | QPREPQVCTLPPSRDELTKNQVSLSCAVKG |
| | | | | | FYPSDIAVEWESNGQPENNYKTTPPVLDSD |
| | | | | | GSFFLVSKLTVDKSRWQQGNVFSCSVMHEA |
| | | | | | LHNHYTQKSLSLSPGPGSGSAVNGTSQFTC |
| | | | | | FYNSRANISCVWSQDGALQDTSCQVHAWPD |
| | | | | | RRRWNQTCELLPVSQASWACNLILGAPDSQK |
| | | | | | LTTVDIVTLRVLCREGVRWRVMAIQDFKPF |
| | | | | | ENLRLMAPISLQVVHVETHRCNISWEISQAS |
| | | | | | HYFERHLEFEARTLSPGHTWEEAPLLTLKQ |
| | | | | | KQEWICLETLTPDTQYEFQVRVKPLQGEFT |
| | | | | | TWSPWSQPLAFRTKPAALGKD |
| | | | | | (SEQ ID NO: 38) |
| AK453 | DNA565 | Knob: | SGP | APTSSSTKKTQL | DKTHTCPPCPAPELLGGPSVFLFPPK |
| | | hFc | (SEQ | QLLHLCLRLQMI | PKDTLMISRTPEVTCVVVDVSHEDP |
| | | (N297A) | ID | LNGINNYKNPKL | EVKFNWYVDGVEVHNAKTKPREEQY |
| | | [VPLSLY]- | NO: 29) | TAMLTAKFAMP | ASTYRVVSVLWLHQDWLNGKEYKCK |
| | | hIL2 | | KKATELKHLQCL | VSNKALPAPIEKTISKAKGQPREPQ |
| | | (E15R, | | EEALKPLEEVLN | VCTLPPCRDELTKNQVSLWCLVKGF |
| | | L18C, | | LAQSKNFHLRPR | YPSDIAVEWESMGQPENNYKTTPPV |
| | | D20R, | | DLISLINVIVLE | LDSDGSFFLYSKLTVDKSRWQQGNV |
| | | R38A, | | LKGSETTFMCEY | FSCSVMHEALHNHYTQKSLSLSPGG |
| | | F42A, | | ADETATIVEFLNR | SPGVPLSLYSGPAPTSSSTKKTQLQ |
| | | Y45A, | | WITFCQSIISTLT | LLHLCLRLQMILNGINNYKNPKLTA |
| | | E62A, | | (SEQ ID | MLTAKFAMPKKATELKHLQCLEEAL |
| | | N88L) | | NO: 341) | KPLEEVLNLAQSKNFHLRPRDLISL |
| | | | | | INVIVLELKGSETTFMCEYADETAT |
| | | | | | IVEFLNRWITFCQSIISTLT |
| | | | | | (SEQ ID NO: 387) |
| AK454 | DNA187 | Hole: | | | DKTHTCPPCPAPELLGGPSVFLFPPKPKDT |
| | | hFc(N297A)- | | | LMISRTPEVTCVVVDVSHEDPEVKFNWYVD |
| | | hCD122 | | | GVEVHNAKTKPREEQYASTYRWSVLTVLHQ |
| | | | | | DWLNGKEYKCKVSNKALPAPIEKTISKAKG |
| | | | | | QPREPQVCTLPPSRDELTKNQVSLSCAVKG |
| | | | | | FYPSDIAVEWESNGQPENNYKTTPPVLDSD |
| | | | | | GSFFLVSKLTVDKSRWQQGNVFSCSVMHEA |
| | | | | | LHNHYTQKSLSLSPGP6SGSAVNGTSQFTC |
| | | | | | FYNSRANISCVWSQDGALQDTSCQVHAWPD |
| | | | | | RRRWNQTCELLPVSQASWACNLILGAPDSQK |
| | | | | | LTTVDIVTLRVLCREGVRWRVMAIQDFKPF |
| | | | | | ENLRLMAPISLQVVHVETHRCNISWEISQAS |
| | | | | | HYFERHLEFEARTLSPGHTWEEAPLLTLKQ |
| | | | | | KQEWICLETLTPDTQYEFQVRVKPLQGEFT |
| | | | | | TWSPWSQPLAFRTKPAALGKD |
| | | | | | (SEQ ID NO: 38) |
| AK454 | DNA566 | Knob: | SGP | APTSSSTKKTQL | DKTHTCPPCPAPELLGGPSVFLFPPK |
| | | hFc | (SEQ | QLRHLCLDLQM | PKDTLMISRTPEVTCVCCDVSHEDP |
| | | (N297A)- | ID | ILNGINNYKNPK | EVKFNWYVDGVEVHNAKTKPREEQY |
| | | [VPLSLY] | NO: 29) | LTAMLTAKFAM | ASTYRVVSVLTVLHQDWLNGKEYKC |
| | | hIL2 | | PKKATELKHLQC | KVSNKALPAPIEKTISKAKGQPREP |
| | | (E15R, | | LEEALKPLEEVL | QVYTLPPCRDELTKMQVSLWCLVKG |
| | | L18C, | | NLAQSKNFHLR | FYPSDIAVEWESNGQPENNYKTTPP |
| | | R38A, | | PRDLISLINVIVL | VLDSDGSFFLYSKLTVDKSRWQQGN |
| | | F42A, | | ELKGSETTFMCE | VFSCSVMHEALHNHYTQKSLSLSPG |
| | | Y45A, | | YADETATIVEFL | GSPGVPLSLYSGPAPTSSSTKKTQL |
| | | E62A, | | NRWITFCQSIIS | QLRHLCLDLQMILMGINNYKNPKLT |
| | | N88L) | | TLT | AMLTAKFAMPKKATELKHLQCLEEA |
| | | | | (SEQ ID | LKPLEEVLNWQSKNFHLRPRDLISL |
| | | | | NO: 342) | INVIVLELKGSETTFMCEYADETAT |
| | | | | | IVEFLNRVVITFCQSIISTLT |
| | | | | | (SEQ ID NO: 388) |
| AK455 | DNA187 | Hole: | SGP | | DKTHTCPPCPAPELLGGPSVFLFPPKPKDT |
| | | hFc(N297A)- | (SEQ | | LMISRTPEVTCVVVDVSHEDPEVKFNWYVD |
| | | hCD122 | ID | | GVEVHNAKTKPREEQYASTYRWSVLTVLHQ |
| | | | NO: 29) | | DWLNGKEYKCKVSNKALPAPIEKTISKAKG |
| | | | | | QPREPQVCTLPPSRDELTKNQVSLSCAVKG |
| | | | | | FYPSDIAVEWESNGQPENNYKTTPPVLDSD |
| | | | | | GSFFLVSKLTVDKSRWQQGNVFSCSVMHEA |
| | | | | | LHNHYTQKSLSLSPGP6SGSAVNGTSQFTC |
| | | | | | FYNSRANISCVWSQDGALQDTSCQVHAWPD |
| | | | | | RRRWNQTCELLPVSQASWACNLILGAPDSQK |
| | | | | | LTTVDIVTLRVLCREGVRWRVMAIQDFKPF |
| | | | | | ENLRLMAPISLQVVHVETHRCNISWEISQAS |
| | | | | | HYFERHLEFEARTLSPGHTWEEAPLLTLKQ |
| | | | | | KQEWICLETLTPDTQYEFQVRVKPLQGEFT |
| | | | | | TWSPWSQPLAFRTKPAALGKD |
| | | | | | (SEQ ID NO: 38) |
| AK455 | DNA565 | Knob: | | APTSSSTKKTQL | DKTHTCPPCPAPELLGGPSVFLFP |
| | | hFc | | QLEHLCLRLQMI | PKPKDTLMISRTPE |
| | | (N297A) | | LNGINNYKNPKL | VTCVVVDVSHEOPEVKFNWYVDGVE |
| | | [VPLSLY]- | | TAMLTAKFAMP | VHNAKTKPREEQYASTYRVVSVLTV |
| | | hIL2 | | KKATELKHLQCL | LHQDWLNGKEYKCKVSNKALPAPIE |
| | | (L18C, | | EEALKPLEEVLN | KTISKAKGQPREPQVYTLPPCRDEL |
| | | D20R, | | LAQSKNFHLRPR | TKMQVSLWCLVKGFYPSDIAVEWES |
| | | R38A, | | DLISLINVIVLEL | NGQPENNYKTTPPVLDSDGSFFLYS |
| | | F42A, | | KGSETTFMCEYA | KLTVDKSRWQQGNVFSCSVMHEALH |
| | | Y45A, | | DETATIVEFINR | NHYTQKSLSLSPGGSPGVPLSLYSG |
| | | E62A, | | WITFCQSIISTLT | PAPTSSSTKICTQLQLEHLCLRLQM |
| | | N88L) | | (SEQ ID | ILNGINNYKNPKLTAMLTAKFAMPK |
| | | | | NO: 343) | KATELKHLQCLEEALKPLEEVLNLA |
| | | | | | QSKNFHLRPRDLISLINVIVLELKG |
| | | | | | SETTFMCEYADETATIVEFLNRWIT |
| | | | | | FCQSIISTLT |
| | | | | | (SEQ ID NO: 389) |
| AK456 | DNA187 | Hole: | | | DKTHTCPPCPAPELLGGPSVFLFPPKPKDT |
| | | hFc(N297A)- | | | LMISRTPEVTCVVVDVSHEDPEVKFNWYVD |
| | | hCD122 | | | GVEVHNAKTKPREEQYASTYRWSVLTVLHQ |
| | | | | | DWLNGKEYKCKVSNKALPAPIEKTISKAKG |
| | | | | | QPREPQVCTLPPSRDELTKNQVSLSCAVKG |
| | | | | | FYPSDIAVEWESNGQPENNYKTTPPVLDSD |
| | | | | | GSFFLVSKLTVDKSRWQQGNVFSCSVMHEA |
| | | | | | LHNHYTQKSLSLSPGP6SGSAVNGTSQFTC |
| | | | | | FYNSRANISCVWSQDGALQDTSCQVHAWPD |
| | | | | | RRRWNQTCELLPVSQASWACNLILGAPDSQK |
| | | | | | LTTVDIVTLRVLCREGVRWRVMAIQDFKPF |
| | | | | | ENLRLMAPISLQVVHVETHRCNISWEISQAS |
| | | | | | HYFERHLEFEARTLSPGHTWEEAPLLTLKQ |
| | | | | | KQEWICLETLTPDTQYEFQVRVKPLQGEFT |
| | | | | | TWSPWSQPLAFRTKPAALGKD |
| | | | | | (SEQ ID NO: 38) |
| AK456 | DNA568 | Knob: | SGP | APTSSSTKKT | |
| | | HFc(N297A)- | (SEQ | QLQLFHLCLR | DKTHTCPPCPAPELLGGPSVFLFPPKPKDT |
| | | [VPLSLY]- | ID | LQMILNGINN | LMISRTPEVTCVVVDVSHEDPEVKFNWYVD |
| | | hIL2(E15F, | NO: 29) | YKNPKLTAML | GVEVHNAKTKPREEQYASTYRVVSVLTVLHQ |
| | | L18C, D20R, | | TAKFAMPKKA | DWLNGKEYKCKVSNKALPAPIEKTISKAKG |
| | | R38A, F42A, | | TELKHLQCLE | QPREPQVYTIPPCRDEITKNQVSLWCIVKG |
| | | Y45A, E62A, | | EALKPLEEVLN | FYPSDIAVEWESNGQPENNYKTTPPVLDSD |
| | | N88L) | | LAQSKNFHLRPR | GSFFLYSKLTVDKSRWQQGNVFSCSVMHEA |
| | | | | DLISLINVIVLE | LHNHYTQKSLSLSPGGSPGVPLSLYSGPAP |
| | | | | LKGSETTFMCEY | TSSSTKKTQLQLFHLCLRLQMILNGINNYK |
| | | | | ADETATIVEFLN | NPKLTAMLTAKFAMPKKATELKHLQCLEEA |
| | | | | RWITFCQSIIST | LKPLEEVLNLAQSKNFHIRPRDLISLINVI |
| | | | | LT | VLELKGSETTFMCEYADETATIVEFLNRWI |
| | | | | (SEQ ID | TFCQSIISTLT (SEQ ID NO: 390) |
| | | | | NO: 344) | |
| AK462 | DNA530 | Knob: | | | VRSGCKPCICTVPEVSSVFIFPPKPKDVLT |
| | | MFcIgG1(DAP | | | ITITPKVTCVVVAISKDDPEVQFSWFVDDV |
| | | G)- | | | EVHTAQTQPREEQFNSTFRSVSELPIMHQD |
| | | hIL2(R38A, | | | WLNGKEFKCRVNSAAFGAPIEKTISKTKGR |
| | | F42A, | | | PKAPQVYTIPPPKEQMAKDKVSLTCMITDF |
| | | Y45A, | | | FPEDITVEWQWNGQPAENYDNTQPIMDTDG |
| | | E62A, | | | SYFVYSDLNVQKSNWEAGNTFTCSVLHEGL |
| | | C125A) | | | HNHHTEKSLSHSPGGGSSPPGGGSSGGGSG |
| | | | | | PAPTSSSTKKTQLQLEHLLLDLQMILNGIN |
| | | | | | NYKNPKLTAMLTAKFAMPKKATELKHLQCL |
| | | | | | EEALKPLEEVLNLAQSKNFHLRPRDLISNI |
| | | | | | NVIVLELKGSETTFMCEYADETATIVEFLN |
| | | | | | RWITFAQSHSTLT |
| | | | | | (SEQ ID NO: 369) |
| AK462 | DNA532 | Hole: | | | VRSGCKPCICTVPEVSSVFIFPPKPKDVLT |
| | | MFcIgG1 | | | ITLTPKVTCVVAISKDDPEVQFSWFVDDVE |
| | | (DAPG) | | | VHTAQTGPREEQFNSTFRSVSELPIMHQDW |
| | | | | | LNGKEFKCRVNSAAFGAPIEKTISKTKGRP |
| | | | | | KAPQVYTIPPPKKQMAKDKVSITCMITDFF |
| | | | | | PEDITVEWQWNGQPAENYKNTQ |
| | | | | | PIMKTDGSYFVYSKLNVQKSNWEAGNTFTC |
| | | | | | SVLHEGLHNHHTEKSLSHSPG |
| | | | | | (SEQ ID NO: 284) |
| AK463 | DNA530 | Knob: | | | VRSGCKPCICTVPEVSSVFIFPPKPKDVLT |
| | | MFcIgG1 | | | ITLTPKVTCVVVAISKDDPEVQFSWFVDDV |
| | | (DAPG)- | | | EVHTAQTQPREEQFNSTFRSVSELPIMHQD |
| | | hIL2(R38A, | | | WLNGKEFKCRVNSAAFGAPIEKTISKTKGR |
| | | F42A, | | | PKAPQVTIPPPKEQMAKDKVSLTCMITDFF |
| | | Y45A, | | | PEDITVEWQWNGQPAENYDNTQPIMDTDGS |
| | | E62A, | | | YFVYSDLNVQKSNWEAGNTFTCSVLHEGLH |
| | | C125A) | | | NHHTEKSLSHSPGGGSSPPGGGSSGGGSGP |
| | | | | | APTSSSTKKTQLQLEHLLLDIQMILNGINN |
| | | | | | YKNPKLTAMLTAKFAMPKKATELKHLQCLE |
| | | | | | EALKPLEEVLNLAQSKNFHLRPRDLISNIN |
| | | | | | VIVLELKGSETTFMCEYADETATIVEFLNR |
| | | | | | WITFAQSHSTLT |
| | | | | | (SEQ ID NO: 369) |
| AK463 | DNA533 | Hole: | | | VRSGCKPGCTVPGVSSVFIFPPKPKDVLTI |
| | | mFcIgG1 | | | TLTPKVTCVVVAISKDDPEVQFSWFVDDVE |
| | | (DAP | | | VHTAQTQPREEQFNSTFRSVSELPIMHQDW |
| | | G)- | | | LNGKEFKCRVNSAAFGAPIEKTISKTKGRP |
| | | hCD122 | | | KAPQVYTIPPPKKQPMAKDKVSLTCMITDF |
| | | | | | FPEDITVEWQWNGQPAENYKNTQPIMKTDG |
| | | | | | SYFVYSKLNVQKSNWEAGNTFTCSVLHEGL |
| | | | | | HNHHTEKSLSHSPGPGSGSAVNGTSQFTCF |
| | | | | | YNSRANISCVWSQPGALQPTSCQVHAWPDR |
| | | | | | RRWNQTCELLPVSQASWACNLILGAPDSQK |
| | | | | | LTTVDIVTLRVLCREGVRWRVMAIQDFKPF |
| | | | | | ENLRLMAPISLQVVHVETHRCNISWEISQAS |
| | | | | | HYFERHLEFEARTLSPGHTWEEAPLLTLKQ |
| | | | | | KQEWICLETLTPDTQYEFQVRVKPLQGEFT |
| | | | | | TTWSPWSQPLAFRTKPAALGKD |
| | | | | | (SEQ ID NO: 371) |
| AK464 | DNA530 | Knob: | | | VRSGCKPCICTVPEVSSVFIFPPKPKDVLT |
| | | mFcIgG1 | | | ITLTPKVTCVVVAISKDDPEVQFSWFVDDV |
| | | (DAPG)- | | | EVHTAQTQPREEQFNSTFRSVSELPIMHQD |
| | | hIL2 | | | WLNGKEFKCRVNSAAFGAPIEKTISKTKGR |
| | | (R38A, | | | PKAPQVTIPPPKEQMAKDKVSLTCMITDFF |
| | | F42A, | | | PEDITVEWQWNGQPAENYDNTQPIMDTDGS |
| | | Y45A, | | | YFVYSDLNVQKSNWEAGNTFTCSVLHEGLH |
| | | E62A, C125A) | | | NHHTEKSLSHSPGGGSSPPGGGSSGGGSGP |
| | | | | | APTSSSTKKTQLQLEHLLLDIQMILNGINN |
| | | | | | YKNPKLTAMLTAKFAMPKKATELKHLQCLE |
| | | | | | EALKPLEEVLNLAQSKNFHLRPRDLISNIN |
| | | | | | VIVLELKGSETTFMCEYADETATIVEFLNR |
| | | | | | WITFAQSHSTLT |
| | | | | | (SEQ ID NO: 369) |
| AK464 | DNA534 | Hole: | | | VRSGCKPCICTVPEVSSVFIFPPKPKDVLT |
| | | mFcIgG1 | | | ITLTPKVTCVWAISKDDPEVQFSWFV |
| | | (DAP | | | DDVEVHTAQTQPREEQFNSTFRSVSELPIM |
| | | G)- | | | HQDWLNGKEFKCRVNSAAFGAPIE |
| | | mCD122 | | | KTISKTKGRPKAPQVYTIPPPKKQMAKDKV |
| | | | | | SLTCMITDFFPEDITVEWQWNGQP |
| | | | | | AENYKNTQPIMKTDGSYFVYSKLNVQKSNW |
| | | | | | EAGNTFTCSVLHEGLHNHHTEKSL |
| | | | | | SHSPGPGSGSAVKNCSHLECFYNSRANVSC |
| | | | | | MWSHEEALNVTTCHVHAKSNLRH |
| | | | | | WNKTCELTLVRQASWACNLILGSFPESQSL |
| | | | | | TSVDLLOINWCWEEKGWRRVKTC |
| | | | | | DFHPFDNLRLVAPHSLQVLHIDTQRCNISW |
| | | | | | KVSQVSHYIEPYLEFEARRRLLGHS |
| | | | | | WEDASVLSLKQRQQVVLFLEMLIPSTSYEV |
| | | | | | QVRVKAQRNNTGTWSPWSQPLTFR |
| | | | | | TRPADPMKE (SEQ ID NO: 372) |
| AK465 | DNA531 | Knob: | SGP | APTSSSTKKTQL | VRSGCKPCICTVPEVSSVFIFPPKPKDVLH |
| | | MFcIgG1(DAP | (SEQ | QLEHLLLDLQMI | TLTPKVTCVWAISKDDPEVQFSWFV |
| | | G)- | ID | LNGINNYKNPKL | DDVEVHTAQTQPREEQFNSTFRSVSELPIM |
| | | [VPLSLY]- | NO: 29) | TAMLTAKFAMP | HQDWLNGKEFKCRVNSAAFGAPIE |
| | | hIL2(R38A, | | KKATELKHLQCL | KTISKTKGRPKAPQVYTIPPPKEQMAKDKV |
| | | F42A, | | EEALKPLEEVLN | SLTCMITDFFPEDITVEWQWNGQP |
| | | Y45A, | | LAQSKNFHLRPR | AENYDNTQPIMDTDGSYFVYSDLNVQKSNV |
| | | E62A, | | DLISNINVIVLEL | VEAGNTFTCSVLHEGLHNHHTEKS |
| | | C125A) | | KGSETTFMCEY | LSHSPGGSPGVPISLYSGPAPTSSSTKKTQ |
| | | | | ADETATIVEFLN | LQLEHLLLDLQMILNGINNYKNPKLTA |
| | | | | RWITFAQSIISTL | MLTAKFAMPKKATELKHLQCLEEALKPLEE |
| | | | | T | VLNLAQSKNFHLRPRDLISNINVIVLE |
| | | | | (SEQ ID | LKGSETTFMCEYADETATIVEFLMRWITFA |
| | | | | NO: 3) | QSIISTLT (SEQ ID NO: 370) |
| AK465 | DNA532 | Hole: | | | VRSGCKPGCTVPGVSSVFIFPPKPKDVLTI |
| | | mFcIgG1 | | | TLTPKVTCVVVAISKDDPEVQFSWFVDDVE |
| | | (DAP | | | VHTAQTQPREEQFNSTFRSVSELPIMHQDW |
| | | G) | | | LNGKEFKCRVNSAAFGAPIEKTISKTKGRP |
| | | | | | KAPQVYTIPPPKKQPMAKDKVSLTCMITDF |
| | | | | | FPEDITVEWQWNGQPAENYKNTQPIMKTDG |
| | | | | | SYFVYSKLNVQKSNWEAGNTFTCSVLHEGL |
| | | | | | HNHHTEKSLSHSPGPGSGSAVNGTSQFTCF |
| | | | | | YNSRANISCVWSQPGALQPTSCQVHAWPDR |
| | | | | | RRWNQTCELLPVSQASWACNLILGAPDSQK |
| | | | | | LTTVDIVTLRVLCREGVRWRVMAIQDFKPF |
| | | | | | ENLRLMAPISLQVVHVETHRCNISWEISQAS |
| | | | | | HYFERHLEFEARTLSPGHTWEEAPLLTLKQ |
| | | | | | KQEWICLETLTPDTQYEFQVRVKPLQGEFT |
| | | | | | TTWSPWSQPLAFRTKPAALGKD |
| | | | | | (SEQ ID NO: 371) |
| AK466 | DNA531 | Knob: | SGP | APTSSSTKKTQL | VRSGCKPCICTVPEVSSVFIFPPKPKDVLH |
| | | MFcIgG1(DAP | (SEQ | QLEHLLLDLQMI | TLTPKVTCVWAISKDDPEVQFSWFV |
| | | G)- | ID | LNGINNYKNPKL | DDVEVHTAQTQPREEQFNSTFRSVSELPIM |
| | | [VPLSLY]- | NO: 29) | TAMLTAKFAMP | HQDWLNGKEFKCRVNSAAFGAPIE |
| | | hIL2(R38A, | | KKATELKHLQCL | KTISKTKGRPKAPQVYTIPPPKEQMAKDKV |
| | | F42A, | | EEALKPLEEVLN | SLTCMITDFFPEDITVEWQWNGQP |
| | | Y45A, | | LAQSKNFHLRPR | AENYDNTQPIMDTDGSYFVYSDLNVQKSNV |
| | | E62A, | | DLISNINVIVLEL | VEAGNTFTCSVLHEGLHNHHTEKS |
| | | C125A) | | KGSETTFMCEY | LSHSPGGSPGVPISLYSGPAPTSSSTKKTQ |
| | | | | ADETATIVEFLN | LQLEHLLLDLQMILNGINNYKNPKLTA |
| | | | | RWITFAQSIISTL | MLTAKFAMPKKATELKHLQCLEEALKPLEE |
| | | | | T | VLNLAQSKNFHLRPRDLISNINVIVLE |
| | | | | (SEQ ID | LKGSETTFMCEYADETATIVEFLMRWITFA |
| | | | | NO: 3) | QSIISTLT (SEQ ID NO: 370) |
| AK466 | DNA533 | Hole: | | | VRSGCKPCICTVPEVSSVFIFPPKPKDVLT |
| | | mFcIgG1 | | | ITLTPKVTCVWAISKDDPEVQFSWFV |
| | | (DAP | | | DDVEVHTAQTQPREEQFNSTFRSVSELPIM |
| | | G)- | | | HQDWLNGKEFKCRVNSAAFGAPIE |
| | | mCD122 | | | KTISKTKGRPKAPQVYTIPPPKKQMAKDKV |
| | | | | | SLTCMITDFFPEDITVEWQWNGQP |
| | | | | | AENYKNTQPIMKTDGSYFVYSKLNVQKSNW |
| | | | | | EAGNTFTCSVLHEGLHNHHTEKSL |
| | | | | | SHSPGPGSGSAVKNCSHLECFYNSRANVSC |
| | | | | | MWSHEEALNVTTCHVHAKSNLRH |
| | | | | | WNKTCELTLVRQASWACNLILGSFPESQSL |
| | | | | | TSVDLLOINWCWEEKGWRRVKTC |
| | | | | | DFHPFDNLRLVAPHSLQVLHIDTQRCNISW |
| | | | | | KVSQVSHYIEPYLEFEARRRLLGHS |
| | | | | | WEDASVLSLKQRQQVVLFLEMLIPSTSYEV |
| | | | | | QVRVKAQRNNTGTWSPWSQPLTFR |
| | | | | | TRPADPMKE (SEQ ID NO: 372) |
| AK467 | DNA531 | Knob: | SGP | APTSSSTKKTQL | VRSGCKPCICTVPEVSSVFIFPPKPKDVLH |
| | | MFcIgG1(DAP | (SEQ | QLEHLLLDLQMI | TLTPKVTCVWAISKDDPEVQFSWFV |
| | | G)- | ID | LNGINNYKNPKL | DDVEVHTAQTQPREEQFNSTFRSVSELPIM |
| | | [VPLSLY]- | NO: 29) | TAMLTAKFAMP | HQDWLNGKEFKCRVNSAAFGAPIE |
| | | hIL2(R38A, | | KKATELKHLQCL | KTISKTKGRPKAPQVYTIPPPKEQMAKDKV |
| | | F42A, | | EEALKPLEEVLN | SLTCMITDFFPEDITVEWQWNGQP |
| | | Y45A, | | LAQSKNFHLRPR | AENYDNTQPIMDTDGSYFVYSDLNVQKSNV |
| | | E62A, | | DLISNINVIVLEL | VEAGNTFTCSVLHEGLHNHHTEKS |
| | | C125A) | | KGSETTFMCEY | LSHSPGGSPGVPISLYSGPAPTSSSTKKTQ |
| | | | | ADETATIVEFLN | LQLEHLLLDLQMILNGINNYKNPKLTA |
| | | | | RWITFAQSIISTL | MLTAKFAMPKKATELKHLQCLEEALKPLEE |
| | | | | T | VLNLAQSKNFHLRPRDLISNINVIVLE |
| | | | | (SEQ ID | LKGSETTFMCEYADETATIVEFLMRWITFA |
| | | | | NO: 3) | QSIISTLT (SEQ ID NO: 370) |
| AK467 | DNA534 | Hole: | | | VRSGCKPCICTVPEVSSVFIFPPKPKDVLT |
| | | mFcIgG1 | | | ITLTPKVTCVWAISKDDPEVQFSWFV |
| | | (DAP | | | DDVEVHTAQTQPREEQFNSTFRSVSELPIM |
| | | G)- | | | HQDWLNGKEFKCRVNSAAFGAPIE |
| | | mCD122 | | | KTISKTKGRPKAPQVYTIPPPKKQMAKDKV |
| | | | | | SLTCMITDFFPEDITVEWQWNGQP |
| | | | | | AENYKNTQPIMKTDGSYFVYSKLNVQKSNW |
| | | | | | EAGNTFTCSVLHEGLHNHHTEKSL |
| | | | | | SHSPGPGSGSAVKNCSHLECFYNSRANVSC |
| | | | | | MWSHEEALNVTTCHVHAKSNLRH |
| | | | | | WNKTCELTLVRQASWACNLILGSFPESQSL |
| | | | | | TSVDLLOINWCWEEKGWRRVKTC |
| | | | | | DFHPFDNLRLVAPHSLQVLHIDTQRCNISW |
| | | | | | KVSQVSHYIEPYLEFEARRRLLGHS |
| | | | | | WEDASVLSLKQRQQVVLFLEMLIPSTSYEV |
| | | | | | QVRVKAQRNNTGTWSPWSQPLTFR |
| | | | | | TRPADPMKE (SEQ ID NO: 372) |
| AK468 | DNA576 | Hole: | | | DKTHTCPPCPAPELLGGPSVFLFPPKPKDT |
| | | hFc(N297A, | | | LYITREPEVTCVVVDVSHEDPEVKFNWYVD |
| | | M252Y, | | | GVEVHNAKTKPREEQYASTYRVVSVLTVLH |
| | | S254T, | | | QDWLNGKEYKCKVSNKALPAPIEKTISKAK |
| | | T256E)- | | | GQPREPQVCTLPPSRDELTKNQVSLSCAVK |
| | | hCD122 | | | GFYPSDIAVEWESNGQPENNYKTTPPVLDS |
| | | | | | DGSFFLVSKLTVDKSRWQQGNVFSCSVMHE |
| | | | | | ALHNHYTQKSLSLSPGPGSGSAVNGTSQFT |
| | | | | | CFYNSRANISCVWSQDGALQDTSCQVHAWP |
| | | | | | DRRRWNQTCELLPVSQASWACNLILGAPDS |
| | | | | | QKLTTVDIVTLRVLCREGVRWRVMAIQDFK |
| | | | | | PFENLRLMAPISLQVVHVETHRCNISWEISQ |
| | | | | | ASHYFERHLEFEARTISPGHTWEEAPLLTL |
| | | | | | KQKQEWICLETLTPDTQYEFQVRVKPLQGE |
| | | | | | FTTWSPWSQPLAFRTKPAALGKD |
| | | | | | (SEQ ID NO: 392) |
| AK468 | DNA580 | Knob: | SGP | APTSSSTKKTQL | DKTHTCPPCPAPELLGGPSVFLFPPKPKDT |
| | | hFc(N297A, | (SEQ | QLEHLLLDLQMI | LYITREPEVTCVVVDVSHEDPEVKFNWYVD |
| | | M252Y, | ID | LNGINNYKNPKL | GVEVHNAKTKPREEQYASTYRVVSVLTVLH |
| | | S2547, | NO: 29) | TAMLTAKFAMP | QDWLNGKEYKCKVSNKALPAPIEKTISKAK |
| | | T256E)- | | KKATELKHLQCL | GQPREPQVYTLPPCRDELTKNQVSLWCLVK |
| | | [VPLSLY]- | | EEALKPLEEVLN | GFYPSDIAVEWESNGQPENNYKTPPVLD |
| | | hIL2(R38A, | | LAQSKNFHLRPR | SDGSFFLYSKLTVDKSRWQQGNVF |
| | | F42A, | | DLISNINVIVLEL | SCSVMHEALHNHYTQKSLSLSPGGSPGVPL |
| | | Y45A, | | KGSETTFMCEY | SLYSGPAPTSSSTKKTQLQLEHLLLDLQMI |
| | | E62A, | | ADETATIVEFLN | LNGINNYKNPKITAMLTAKFAMPKKATELK |
| | | C125A) | | RWITFAQSIISTL | HLQCLEEALKPLEEVLNLAQSKNFHLRPRD |
| | | | | T | LISNINVIVLELKGSETTFMCEYADETATI |
| | | | | (SEQ ID | VEFLNRWITFAQSIISTLT |
| | | | | NO: 3) | (SEQ ID NO: 396) |
| AK469 | DNA575 | Hole: | | | DKTHTCPPCPAPELLGGPSVFLFPPKPKDT |
| | | hFc(N297A, | | | LMASRTPEVTCVVVDVSHEDPEVKFNWYVD |
| | | I253A)- | | | GVEVHNAIDKPREEQYASTYRVVSVLTVLH |
| | | HCD122 | | | QDWLNGKEYKCKVSNKALPAPIEKTISKAK |
| | | | | | GQPREPQVCTLPPSRDELTKNQVSLSCAVK |
| | | | | | GFYPSDIAVEWESNGQPENNYKTTPPVLDS |
| | | | | | DGSFFLVSKLTVDKSRWQQGNVFSCSVMHE |
| | | | | | ALHNHYTQKSLSLSPGPGSGSAVNGTSQFT |
| | | | | | CFYNSRANISCVWSQDGALQDTSCQVHAWP |
| | | | | | DRRRWNQTCELLPVSQASWACNLILGAPDS |
| | | | | | QKLTTVDIVTLRVLCREGVRWRVMAIQPFK |
| | | | | | PFENLRIMAPISLQVVHVETHRCNISWEIS |
| | | | | | QASHYFERHLEFEARTLSPGHTWEEAPLLT |
| | | | | | LKQKQEWICLETLTPDTQYEFQVRVKPLQG |
| | | | | | EFTTVVSPVVSQPLAFRTKPAALGKD |
| | | | | | (SEQ ID NO: 43) |
| AK469 | DNA577 | Knob: | | | DKTHTCPPCPAPELLGGPSVFLFPPKPKDT |
| | | hFc(N297, | | | LMASRTPEVTCVVVDVSHEDPEVKFNWYVD |
| | | I253A)- | | | GVEVHNAKTKPREEQYASTYRVVSVLTVLH |
| | | hIL2 | | | QDWLNGKEYKCKVSNKAIPAPIEKTISKAK |
| | | (R38A, | | | GQPREPQVYTLPPCRDELTKNQVSLWCLVK |
| | | F42A, | | | GFYPSDIAVEWESNGQPENNYKTTPPVLDS |
| | | Y45A, | | | DGSFFLYSKLTVDKSRWQQGNVFSCSVMHE |
| | | E62A, | | | ALHNHYTQKSLSLSPGGGSSPPGGGSSGGG |
| | | C125A) | | | SGPAPTSSSTKKTQLQLEHLLLDLQMILNG |
| | | | | | INNYKNPKLTAMLTAKFAMPKKATELKHLQ |
| | | | | | CLEEALKPLEEVLNIAQSKNFHLRPRDIIS |
| | | | | | NINVIVLELKGSETTFMCEYADETATIVEF |
| | | | | | LNRWITFAQSIISTLT |
| | | | | | (SEQ ID NO: 393) |
| AK470 | DNA576 | Hole: | | | DKTHTCPPCPAPELLGGPSVFLFPPKPKDT |
| | | hFc | | | LYITREPEVTCVVVDVSHEDPEVKFNWYVD |
| | | (N297A, | | | GVEVHNAKTKPREEQYASTYRVVSVLTVLH |
| | | M252Y, | | | QDWLNGKEYKCKVSNKALPAPIEKTISKAK |
| | | S254T, | | | GQPREPQVCTLPPSRDELTKNQVSLSCAVK |
| | | T256E)- | | | GFYPSDIAVEWESNGQPENNYKTTPPVLDS |
| | | hCD122 | | | DGSFFLVSKLTVDKSRWQQGNVFSCSVMHE |
| | | | | | ALHNHYTQKSLSLSPGPGSGSAVNGTSQFT |
| | | | | | CFYNSRANISCVWSQDGALQDTSCQVHAWP |
| | | | | | DRRRWNQTCELLPVSQASWACNLILGAPDS |
| | | | | | QKLTTVDIVTLRVLCREGVRWRVMAIQDFK |
| | | | | | PFENLRLMAPISLQVVHVETHRCNISWEISQ |
| | | | | | ASHYFERHLEFEARTISPGHTWEEAPLLTL |
| | | | | | KQKQEWICLETLTPDTQYEFQVRVKPLQGE |
| | | | | | FTTWSPWSQPLAFRTKPAALGKD |
| | | | | | (SEQ ID NO: 392) |
| AK470 | DNA578 | Knob: | | | DKTHTCPPCPAPELLGGPSVFLFPPKPKDT |
| | | hFc | | | LYITREPEVTCVVVDVSHEDPEVKFNWYVD |
| | | (N297A, | | | GVEVHNAKTKPREEQYASTYRVVSVLTVLH |
| | | M252Y, | | | QDWLNGKEYKCKVSNKALPAPIEKTISKAK |
| | | S254T, | | | GQPREPQVCTLPPCRDELTKNQVSLWCLVK |
| | | T256E)- | | | GFYPSDIAVEWESNGQPENNYKTTPPVLDS |
| | | hIL2 | | | DGSFFLYSKLTVDKSRWQQGNVFSCSVMHE |
| | | (R38A, | | | ALHNHYTQKSLSLSPGGGSSPPGGGSSGGG |
| | | F42A, | | | SGPAPTSSSTKKTQLQLEHLILDLQMILNG |
| | | Y45A, | | | INNYKNPKLTAMLTAKFAMPKKATELKHLQ |
| | | E62A, | | | CEEALKPLEEVLNLAQSKNFHLRPRDLISN |
| | | C125A) | | | INVIVLELKGSETTFMCEYADETATIVEFL |
| | | | | | NRWITFAQSIISTLT |
| | | | | | (SEQ ID NO: 394) |
| AK471 | DNA575 | Hole: | | | DKTHTCPPCPAPELLGGPSVFLFPPKPKDT |
| | | hFc(N297A, | | | LMASRTPEVTCVVVDVSHEDPEVKFNWYVD |
| | | I253A)- | | | GVEVHNAIDKPREEQYASTYRVVSVLTVLH |
| | | hCD122 | | | QDWLNGKEYKCKVSNKALPAPIEKTISKAK |
| | | | | | GQPREPQVCTLPPSRDELTKNQVSLSCAVK |
| | | | | | GFYPSDIAVEWESNGQPENNYKTTPPVLDS |
| | | | | | DGSFFLVSKLTVDKSRWQQGNVFSCSVMHE |
| | | | | | ALHNHYTQKSLSLSPGPGSGSAVNGTSQFT |
| | | | | | CFYNSRANISCVWSQDGALQDTSCQVHAWP |
| | | | | | DRRRWNQTCELLPVSQASWACNLILGAPDS |
| | | | | | QKLTTVDIVTLRVLCREGVRWRVMAIQPFK |
| | | | | | PFENLRIMAPISLQVVHVETHRCNISWEIS |
| | | | | | QASHYFERHLEFEARTLSPGHTWEEAPLLT |
| | | | | | LKQKQEWICLETLTPDTQYEFQVRVKPLQG |
| | | | | | EFTTVVSPVVSQPLAFRTKPAALGKD |
| | | | | | (SEQ ID NO: 43) |
| AK471 | DNA579 | Knob: | SGP | APTSSSTKKTQL | DKTHTCPPCPAPELLGGPSVFLFPPKPKDT |
| | | hFc(N297, | (SEQ | QLEHLLLDLQMI | LMASRTPEVTCVVDVSHEDPEVKFNWYVDG |
| | | I253A)- | ID | LNGINNYKNPKL | VEVHNAKTKPREEQYASTYRVVSVLTVLHQ |
| | | [VPLSLY]- | NO: 29) | TAMLTAKFAMP | DWLNGKEYKCKVSNKALPAPIEKTISKAKG |
| | | hIL2(R38A, | | KKATELKHLQCL | QPREPQVYTLPPCRDELTKNQVSLWCAVKG |
| | | F42A, | | EEALKPLEEVLN | FYPSDIAVEWESNGQPE |
| | | Y45A, | | LAQSKNFHLRPR | NNYKTTPPVLDSDGSFFLYSKLTVDKSRWQ |
| | | E62A, | | DLISNINVIVLEL | QGNVFSCSVMHEALHNHYTQKSLSLSPGGS |
| | | C125A) | | KGSETTFMCEY | PGVPLSLYSGPAPTSSSTKKTQLQIEHLLL |
| | | | | ADETATIVEFLN | DLQMILNGINNYKNPKLTAMLTAKFAMPKK |
| | | | | RWITFAQSIISTL | ATELKHLQCLEEALKPLEEVLNLAQSKNFH |
| | | | | T | LRPRDLISNINVIVLELKGSETTFMCEYAD |
| | | | | (SEQ ID | ETATIVEFLNRWITFAQSIISTLT |
| | | | | NO: 3) | (SEQ ID NO: 50) |
| AK475 | DNA255 | Knob: | | | DKTHTCPPCPAPELLGGPSVFLFPPKPKDT |
| | | hFc(N297A)- | | | LMISRTPEVVTCVVVDVSHEDPEVKFNWYV |
| | | hIL2(R38A, | | | DGVEVHNAKTKPREEQYASTYRVVSVLTVL |
| | | F42A, | | | HQDWLNGKEYKCKVSNKALPAPIEKTISKA |
| | | Y45A, | | | KGQPREPQVYTLPPCRDELTKNQVSLWCLV |
| | | E62A, | | | KGFYPSDIAVEVVESNGQPENNYKTTPPVL |
| | | C125A) | | | DSDGSFFLYSKLTVDKSRWQQGNVFSCSVM |
| | | | | | HEALHNHYTQKSLSLSPGGGSSPPGGGSSG |
| | | | | | GGSGPAPTSSSTKKTQLQLEHLLLDLQMIL |
| | | | | | NGINNYKNPKITAMLTAKFAMPKKATELKH |
| | | | | | IQCLEEALKPLEEVLNLAQSKNFHLRPRDL |
| | | | | | ISNINVIVLELKGSETTFMCEYADETATIV |
| | | | | | EFLNRWITFAQSIISTLT |
| | | | | | (SEQ ID NO: 51) |
| AK475 | DNA528 | Hole: | | | DKTHTCPPCPAPELLGGPSVFLFPPKPKDT |
| | | hFc(N297A)- | | | LMISRTPEVTCVVVDVSHEDPEVKFNWYVD |
| | | hCD122(C168 | | | GVEVHNAKTKPREEQYASTYRWSVITVLHQ |
| | | 8) | | | DWINGKEYKCKVSNKAIPAPIEKTISKAKG |
| | | | | | QPREPQVYTLPPSRDELTKNQVSLSCAVKG |
| | | | | | FYPSDIAVE |
| | | | | | WESNGQPENNYKTTPPVLDSDGSFFLVSKL |
| | | | | | TVDKSRWQQGNVFSCSVMHEALHNHYTQKS |
| | | | | | LSLSPGPGSGSAVNGTSQFTCFYNSRANIS |
| | | | | | CVWSQDGALQDTSCQVHAWPDRRRWNQTCE |
| | | | | | LLPVSQASWACNLILGAPDSQKLTTVDIVTL |
| | | | | | RVLCREGVRWRVMAIQDFKPFENLRLMAPI |
| | | | | | SLQVVHVETHRCNISWEISQASHYFERHLEF |
| | | | | | EARTISPGHTWEEAPLLTLKQKQEWISLET |
| | | | | | LTPDTQYEFQVRVKPLQGEFTTWSPWSQPL |
| | | | | | AFRTKPAALGKD (SEQ ID NO: 368) |
| AK476 | DNA263 | Knob: | SGP | APTSSSTKKTQL | DKTHTCPPCPAPELLGGPSVFLFPPKPKDTL |
| | | hFc(N297A)- | (SEQ | QLEHLLLDLQMI | MISRTPEVTCVVVDVSHEDPEVKFNWYVDGV |
| | | [VPLSLY]- | ID | LNGINNYKNPKL | EVHNAKTKPREEQYASTYRVVSVLTVLH |
| | | hIL2(R38A, | NO: 29) | TAMLTAKFAMP | QDWLNGKEYKCKVSNKALPAPIEKTISKAK |
| | | F42A, | | KKATELKHLQCL | GQPREPQVYTLPPCRDEITKNQVSLWCLVK |
| | | Y45A, | | EEALKPLEEVIN | GFYPSDIAVEWESNGQPENNYKTPPVLDSD |
| | | E62A, | | LAQSKNFHLRPR | GSFFLYSKLTVDKSRWQQGNVFSCSVMHEA |
| | | C125A) | | DLISNINVIVLEL | LHNHYTQKSLSLSPGGSPGVPLSLYSGPAP |
| | | | | KGSETTFMCEY | TSSSTKKTQLQLEHLLLDLQMILNGINNYK |
| | | | | ADETATIVEPLN | NPKLTAMLTAKFAMPKKATELKHLQCLEEA |
| | | | | RWITFAQSIISTL | LKPL6EVLNLAQSKNFHLRPRDLISNINVI |
| | | | | T | VLELKGSETTFMCEYAQETATIVEFLNRWI |
| | | | | (SEQ ID NO: 3) | TFAQSIISTLT (SEQ ID NO: 49) |
| AK476 | DNA528 | Hole: | | | DKTHTCPPCPAPELLGGPSVFLFPPKPKDT |
| | | hFc(N297A)- | | | LMISRTPEVTCVVVDVSHEDPEVKFNWYVD |
| | | hCD122 | | | GVEVHNAKTKPREEQYASTYRWSVITVLHQ |
| | | (C168S) | | | DWINGKEYKCKVSNKAIPAPIEKTISKAKG |
| | | | | | QPREPQVYTLPPSRDELTKNQVSLSCAVKG |
| | | | | | FYPSDIAVE |
| | | | | | WESNGQPENNYKTTPPVLDSDGSFFLVSKL |
| | | | | | TVDKSRWQQGNVFSCSVMHEALHNHYTQKS |
| | | | | | LSLSPGPGSGSAVNGTSQFTCFYNSRANIS |
| | | | | | CVVVSQDGALQDTSCQVHAWPDRRRWNQTCE |
| | | | | | LLPVSQASWACNLILGAPDSQKLTTVDIVTL |
| | | | | | RVLCREGVRWRVMAIQDFKPFENLRLMAPI |
| | | | | | SLQVVHVETHRCNISWEISQASHYFERHLEF |
| | | | | | EARTISPGHTWEEAPLLTLKQKQEWISLET |
| | | | | | LTPDTQYEFQVRVKPLQGEFTTWSPWSQPL |
| | | | | | AFRTKPAALGKD (SEQ ID NO: 368) |
| AK477 | DNA158 | Hole: | | | DKTHTCPPCPAPELLGGPSVFLFPPKPKDTL |
| | | hFc(N297A) | | | MISRTPEVTCVVVDVSHEDPEVKFNWYVDGV |
| | | | | | EVHNAKTKPREEQYASTYRVVSVLTVLHQDW |
| | | | | | LNGKEYKCKVSNKALPAPIEKTISKAKGQPR |
| | | | | | EPQVCTLPPSRDELTKNQVSLSCAVKGFYPS |
| | | | | | DIAVEWESNGQPENNYKTTPPVLDSDGSFFL |
| | | | | | VSKLTVDKSRWQQGMVFSCSVMHEALHNHY |
| | | | | | TQKSLSLSPG |
| | | | | | (SEQ ID NO: 9) |
| AK477 | DNA554 | Knob: | | APTSSSTKKTQL | DKTHTCPPCPAPELLGGPSVFLFPPKPKDT |
| | | hFc(N297A)- | | QLRHLCLRLQMI | LMISRTPEVTCVVVDVSHEDPEVKFNWYVD |
| | | [VPLSLY]- | | LNGINNYKNPKL | GVEVHNAKTKPREEQYASTYRVVSVITVLH |
| | | hIL2(E15R, | | TAMLTAKFAMP | QDWLNGKEYKCKV |
| | | L18C, D2GR, | | KKATELKHLQCL | SNKALPAPIEKTISKAKGQPREPQVYTLPP |
| | | R38A, F42A, | | EEALKPLEEVIN | CRDELTKNQVSLWCLVKGFYPSDIAVEWES |
| | | Y45A, E62A) | | LAQSKNFHLRPR | NGQPENNYKTTPPVLDSDGSFFLYSKLTVD |
| | | | | DLISNINVIVLEL | KSRWQQGNVFSCSVMHEALHNHYTQKSLSL |
| | | | | KGSETTFMCEY | SPGGSPGVPLSLYSGPAPTSSSTKKTQLQL |
| | | | | ADETATIVEFLN | RHLCLRLQMILNGINNYKNPKLTAMLTAKF |
| | | | | RWITFCQSIISTL | AMPKKATELKHLQCLEEALKPLEEVLNLAQ |
| | | | | T | SKNFHLRPRDLISNINVIVLELKGSETTFM |
| | | | | (SEQ ID | CEYADETATIVEFLNRWITFCQSIISTLT |
| | | | | NO: 339) | (SEQ ID NO: 385) |
| AK484 | DNA158 | Hole: | | | DKTHTCPPCPAPELLGGPSVFLFPPKPKDTL |
| | | hFc(N297A) | | | MISRTPEVTCVVVDVSHEDPEVKFNWYVDGV |
| | | | | | EVHNAKTKPREEQYASTYRVVSVLTVLHQDW |
| | | | | | LNGKEYKCKVSNKALPAPIEKTISKAKGQPR |
| | | | | | EPQVCTLPPSRDELTKNQVSLSCAVKGFYPS |
| | | | | | DIAVEWESNGQPENNYKTTPPVLDSDGSFFL |
| | | | | | VSKLTVDKSRWQQGMVFSCSVMHEALHNHY |
| | | | | | TQKSLSLSPG |
| | | | | | (SEQ ID NO: 9) |
| AK484 | DNA581 | Knob: | SGP | APTSSSTKKTQL | KTHTCPPCPAPELLGGPSVFLFPPKPKDT |
| | | hFc(N297A)- | | QLEHLCLDLQM | LMISRTPEVTCVVVDVSHEDPEVKFNWYVD |
| | | [VPLSLY]- | | ILNGINNYKNPK | GVEVHNAKTKPREEQYASTYRVVSVLTVLH |
| | | hIL2(L18C, | | L7AMLTAKFAM | QDWLNGKEYKCKVSNKALPAPIEKTISKAK |
| | | R38A, F42A, | | PKKATELKHLQC | GQPREPQVYTLPPCRDELTKNQVSLWCLVK |
| | | Y45A, E62A) | | LEEALKPLEEVL | GFYPSDIAVEWESNGQPENNYKTTPPVLDS |
| | | | | NLAQSKNFHLR | DGSFFLY |
| | | | | PRDLISNINVIVL | DSKLTVDKSRWQQGNVFSCSVMHEALKNHYT |
| | | | | ELKGSETTFMCE | QKSLSLSPGGSPGVPLSLYSGPAFTSSSTK |
| | | | | YADETATIVEFL | KTQLQLEHLCLDLQMILNGINNYKNPKLTA |
| | | | | NRWITFCQSHST | MLTAKFAMPKKATELKHIQCIEEALKPLEE |
| | | | | LT | VLNLAQSKNFHLRPRDLISNINVIVLELKG |
| | | | | (SEQ ID NO: 365) | SETTFMCEYADETATIVEFLNRWITFCQSI |
| | | | | | ISTLT (SEQ ID NO: 397) |
| AK485 | DNA158 | Hole: | | | DKTHTCPPCPAPELLGGPSVFLFPPKPKDTL |
| | | hFc(N297A) | | | MISRTPEVTCVVVDVSHEDPEVKFNWYVDGV |
| | | | | | EVHNAKTKPREEQYASTYRVVSVLTVLHQDW |
| | | | | | LNGKEYKCKVSNKALPAPIEKTISKAKGQPR |
| | | | | | EPQVCTLPPSRDELTKNQVSLSCAVKGFYPS |
| | | | | | DIAVEWESNGQPENNYKTTPPVLDSDGSFFL |
| | | | | | VSKLTVDKSRWQQGMVFSCSVMHEALHNHY |
| | | | | | TQKSLSLSPG |
| | | | | | (SEQ ID NO: 9) |
| AK485 | DNA582 | Knob: | SGP | APTSSSTKKTQL | DKTHTCPPCPAPELLGGPSVFLFPPKPKDT |
| | | HFc(N297A)- | (SEQ ID | QLEYLLLDLQMI | LMISRTPEVTCVVVDVSHEDPEVKFNWYVD |
| | | [VPLSLY]- | NO: 29) | LNGINNYKNPKL | GVEVHNAKTKPREEQYASTYRVVSVLTVLH |
| | | hIL2(H16Y, | | TAMLTAKFAMP | QDWLNGKEYKCKVSNKALPAPIEKTISKAK |
| | | R38A, F42A, | | KKATELKHLQCL | GQPREPQVYTLPPCRDELTKNQVSLWCLVK |
| | | Y45A, E62A, | | EEALKPLEEVIN | GFYPSDIAVEWESNGQPENNYKTTPPVLDS |
| | | C125A) | | LAQSKNFHLRPR | DGSFFLY |
| | | | | DLISNINVIVLEL | SKLTVDKSRWQQGNVFSCSVMHEALHNHYT |
| | | | | KGSETTFMCEY | QKSISLSPGGSPGVPLSLYSGPAPTSSSTK |
| | | | | ADETATIVEFLN | KTQLQLEYLLLDLQMILNGINNYKNPKLTA |
| | | | | RWITFAQSIISTL | MLTAKFAMPKKATELKHLQCLEEALKPLEE |
| | | | | T | VLNLAQSKNFHLRPRDLISNINVIVLELKG |
| | | | | (SEQ ID NO: 346) | SETTFMCEYADETATIVEFLNRWITFAQSH |
| | | | | | STLT (SEQ ID NO: 398) |
| AK486 | DNA158 | Hole: | | | DKTHTCPPCPAPELLGGPSVFLFPPKPKDTL |
| | | hFc(N297A) | | | MISRTPEVTCVVVDVSHEDPEVKFNWYVDGV |
| | | | | | EVHNAKTKPREEQYASTYRVVSVLTVLHQDW |
| | | | | | LNGKEYKCKVSNKALPAPIEKTISKAKGQPR |
| | | | | | EPQVCTLPPSRDELTKNQVSLSCAVKGFYPS |
| | | | | | DIAVEWESNGQPENNYKTTPPVLDSDGSFFL |
| | | | | | VSKLTVDKSRWQQGMVFSCSVMHEALHNHY |
| | | | | | TQKSLSLSPG |
| | | | | | (SEQ ID NO: 9) |
| Ak486 | DNA583 | Knob: | SGP | APTSSSTKKTQL | DKTHTCPPCPAPELLGGPSVFLFPPKPKDT |
| | | hFc(N297A)- | (SEQ ID | QLEELLLDLQMI | LMISRTPEVTCVVVDVS |
| | | [VPLSLY]- | NO: 29) | LNGINNYKNPKL | HEDPEVKFNWYVDGVEVHNAKTKPREEQYA |
| | | hIL2(H16E, | | TAMLTAKFAMP | STYRVVSVLTVLHQDWLNGKEYKCKVSNKA |
| | | R38A, F42A, | | KKATELKHLQCL | LPAPIEKTISKAKGQPREPQVYTLPPCRDE |
| | | Y45A, E52A, | | EEALKPLEEVIN | LTKNQVSLW |
| | | Cl25A) | | LAQSKNFHLRPR | CLVKGFYPSDIAVEWESNGQPENNYIOTPP |
| | | | | DLISNINVIVLEL | VLDSDGSFFLYSKLTVDKSRWQQGNVFSCS |
| | | | | KGSETTFMCEY | VMHEALHNHYTQKSLSLSPGGSPGVPLSLY |
| | | | | ADETATIVEFLN | SGPAPTSSSTKKTQLQLEELLLDLQMILNG |
| | | | | RWITFAQSIISTL | INNYKNPKLTAMLTAKFAMPKKATELKHLQ |
| | | | | T | CLEEALKPLEEVLNLAQSKNFHLRPRDLISN |
| | | | | (SEQ ID NO: 347) | INVIVLELKGSETTFMCEYADETATIVEFL |
| | | | | | NRWITFAQSIISTLT |
| | | | | | (SEQ ID NO: 399) |
| AK487 | DNA158 | Hole: | | | DKTHTCPPCPAPELLGGPSVFLFPPKPKDTL |
| | | hFc(N297A) | | | MISRTPEVTCVVVDVSHEDPEVKFNWYVDGV |
| | | | | | EVHNAKTKPREEQYASTYRVVSVLTVLHQDW |
| | | | | | LNGKEYKCKVSNKALPAPIEKTISKAKGQPR |
| | | | | | EPQVCTLPPSRDELTKNQVSLSCAVKGFYPS |
| | | | | | DIAVEWESNGQPENNYKTTPPVLDSDGSFFL |
| | | | | | VSKLTVDKSRWQQGMVFSCSVMHEALHNHY |
| | | | | | TQKSLSLSPG |
| | | | | | (SEQ ID NO: 9) |
| AK487 | DNA584 | Knob: | SGP | APTSSSTKKTQL | DKTHTCPPCPAPELLGGPSVFLFPPKPKDT |
| | | hFc(N297A)- | (SEQ ID | QLEHLLLLLQMI | LMISRTPEVTCVVVDVSHEDPEVKFNWYVD |
| | | [VPLSLY]- | NO: 29) | LNGINNYKNPKL | GVEVHNAKTKPREEQYASTYRVVSVLTVLH |
| | | hIL2,(D20L, | | TAMLTAKFAMP | QDWLNGKEYKCKVSNKALPAPIEKTISKAK |
| | | R3SA, F42A, | | KKATELKHLQCL | GQPREPQVYTLPPCRDELTKNQVSLWCLVK |
| | | Y45A, E62A, | | EEALKPLEEVIN | GFYPSDIAVEWESNGQPENNYKTTPPVLDS |
| | | C125A) | | LAQSKNFHLRPR | DGSFFLYSKLTVDKSRWQQGNVFSCSVMHE |
| | | | | DLISNINVIVLEL | ALHNHYTQKSLSLSPGGSPGVPLSLYSGPA |
| | | | | KGSETTFMCEY | PTSSSTKKTQLQLEHLLLLLQMILNGINNY |
| | | | | ADETATIVEFLN | KNPKLTAMLTAKFAMPKKATELKHLQCLEE |
| | | | | RWITFAQSIISTL | ALKPLEEVLNLAQSKNFHLRPRDLISNINV |
| | | | | T | IVLELKGSETTFMCEYADETATIVEFLNRW |
| | | | | (SEQ ID NO: | ITFAQSIISTLT (SEQ ID NO: 400) |
| | | | | 348) | |
| AK488 | DNA158 | Hole: | | | DKTHTCPPCPAPELLGGPSVFLFPPKPKDTL |
| | | hFc(N297A) | | | MISRTPEVTCVVVDVSHEDPEVKFNWYVDGV |
| | | | | | EVHNAKTKPREEQYASTYRVVSVLTVLHQDW |
| | | | | | LNGKEYKCKVSNKALPAPIEKTISKAKGQPR |
| | | | | | EPQVCTLPPSRDELTKNQVSLSCAVKGFYPS |
| | | | | | DIAVEWESNGQPENNYKTTPPVLDSDGSFFL |
| | | | | | VSKLTVDKSRWQQGMVFSCSVMHEALHNHY |
| | | | | | TQKSLSLSPG |
| | | | | | (SEQ ID NO: 9) |
| AK488 | DNA585 | Knob: | SGP | APTSSSTKKTQL | DKTHTCPPCPAPELLGGPSVFLFPPKPKDT |
| | | hFc(N297A)- | (SEQ ID | QLEYLCLDLQMI | LMISRTPEVTCVVVDVSHEDPEVKFNWYVD |
| | | [VPLSLY]- | NO: 29) | LNGiNNYKNPKL | GVEVHNAKTKPREEQYASTYRVVSVLTVLH |
| | | hIL2(H16Y, | | TAMLTAKFAMP | QDWLNGKEYKCKVSNKALPAPIEKTISKAK |
| | | R38A, F42A, | | KKATELKHLQCL | GQPREPQVYTLPPCRDELTKNQVSLWCLVK |
| | | Y45A, E52A, | | EEALKPLEEVLN | GFYPSDIAVEWESNGQPENNYKTTPPVLDS |
| | | Cl25A) | | LAQSKNFHLRPR | DGSFFLYSKLTVDKSRWQQGNVFSCSVMHE |
| | | | | DLISNINVIVLEL | ALHNHYTQKSLSLSPGGSPGVPLSLYSGPA |
| | | | | KGSETTFMCEY | PTSSSTKKTQLQLEYLCLDLQMILNGINNY |
| | | | | ADETATIVEFLN | KNPKLTAMLTAKFAMPKKATELKHLQCLEE |
| | | | | RWITFCQSIISTL | ALKPLEEVLNLAQSKNFHLRPRDLISNINV |
| | | | | T | IVLELKGSETTFMCEYADETATIVEFLNRW |
| | | | | (SEQ ID NO: | ITFCQSIISTLT (SEQ ID NO: 401) |
| | | | | 349) | |
| AK489 | DNA158 | Hole: | | | DKTHTCPPCPAPELLGGPSVFLFPPKPKDTL |
| | | hFc(N297A) | | | MISRTPEVTCVVVDVSHEDPEVKFNWYVDGV |
| | | | | | EVHNAKTKPREEQYASTYRVVSVLTVLHQDW |
| | | | | | LNGKEYKCKVSNKALPAPIEKTISKAKGQPR |
| | | | | | EPQVCTLPPSRDELTKNQVSLSCAVKGFYPS |
| | | | | | DIAVEWESNGQPENNYKTTPPVLDSDGSFFL |
| | | | | | VSKLTVDKSRWQQGMVFSCSVMHEALHNHY |
| | | | | | TQKSLSLSPG |
| | | | | | (SEQ ID NO: 9) |
| AK489 | DNA586 | Knob: | SGP | APTSSSTKKTQL | DKTHTCPPCPAPELLGGPSVFLFPPKPKDT |
| | | hFc(N297A)- | (SEQ ID | QLEELCLDLQMI | LMISRTPEVTCVVVDVSHEOPEV |
| | | [VPLSLY]- | NO: 29) | LNGINNYKNPKL | KFNWYVDGVEVHNAKTKPREEQYASTYRVV |
| | | hIL2(H16E, | | TAMLTAKFAMP | SVLTVLHQDVVLNGKEYKCKVSNKALPAPI |
| | | L18C, R38A, | | KKATELKHLQCL | EKTISKAKGQPREPQVYTLPPCRDELTKNQ |
| | | F42A, Y45A, | | EEALKPLEEVLN | VSLWCLVKGFYPSDIAVEWESNGQPEN |
| | | E62A) | | LAQSKNFHLRPR | NYKTTPPVLDSDGSFFLYSKLTVDKSRWQQ |
| | | | | DLISNINVIVLEL | GNVFSCSVMHEALHNHYTQKSLSLSPGGSP |
| | | | | KGSETTFMCEY | GVPLSLYSGPAPTSSSTKKTQLQLEELCLD |
| | | | | ADETATIVEFLN | LQMILNGINNYKNPKLTAMLTAKFAMPKKA |
| | | | | RWITFCQSIISTL | TELKHLQCLEEALKPLEEVLNLAQSKNFHL |
| | | | | (SEQ ID NO: | RPRDLISNINVIVLELKGSETTFMCEYADE |
| | | | | 350) | TATIVEFLNRWITFCQSIISTLT |
| | | | | | (SEQ ID NO: 402) |
| AK490 | DNA158 | Hole: | | | DKTHTCPPCPAPELLGGPSVFLFPPKPKDTL |
| | | hFc(N297A) | | | MISRTPEVTCVVVDVSHEDPEVKFNWYVDGV |
| | | | | | EVHNAKTKPREEQYASTYRVVSVLTVLHQDW |
| | | | | | LNGKEYKCKVSNKALPAPIEKTISKAKGQPR |
| | | | | | EPQVCTLPPSRDELTKNQVSLSCAVKGFYPS |
| | | | | | DIAVEWESNGQPENNYKTTPPVLDSDGSFFL |
| | | | | | VSKLTVDKSRWQQGMVFSCSVMHEALHNHY |
| | | | | | TQKSLSLSPG |
| | | | | | (SEQ ID NO: 9) |
| AK490 | DNA587 | Knob: | SGP | APTSSSTKKTQL | DKTHTCPPCPAPELLGGPSVFLFPPKPKDT |
| | | hFc(N297A)- | (SEQ ID | QLEHLCLLLQMI | LMISRTPEVTCVVVDVSHEDPEVKFNWYVD |
| | | [VPLSLY]- | NO: 29) | LNGINNYKNPKL | GVEVHNAKTKPREEQYASTYRVVSVLTVLH |
| | | hIL2(L18C, | | TAMLTAKFAMP | QPWLNGKEYKCKVSNKALPAPIEKTISKAK |
| | | D20L, R38A, | | KKATELKHLQCL | GQPREPQVYTLPPCRDELTKMQVSLWCLVK |
| | | F42A, Y45A, | | EEALKPLEEVLN | GFYPSDIAVEWESMGQPENNYKTTPPVLDS |
| | | E62A) | | LAQSKNFHLRPR | DGSFFLYSKLTVDKSRWQQGNVFSCSVMHE |
| | | | | DLISNINVIVLEL | ALHNHYTQKSLSLSPGGSPGVPLSLYSGPA |
| | | | | KGSETTFMCEY | PTSSSTKKTQLQLEHLCLLLQMILNGINNY |
| | | | | ADETATIVEFLN | KNPKLTAMLTAKFAMPKKATELKHLQCLEE |
| | | | | RWITFCQSIISTL | ALKPLEEVLNLAQSKNFHLRPRDLISNINV |
| | | | | T | IVLELKGSETTFMCBYADETATIVEFLNRW |
| | | | | (SEQ ID NO: 351) | ITFCQSIISTLT (SEQ ID NO: 403) |
| AK491 | DNA158 | Hole: | | | DKTHTCPPCPAPELLGGPSVFLFPPKPKDTL |
| | | hFc(N297A) | | | MISRTPEVTCVVVDVSHEDPEVKFNWYVDGV |
| | | | | | EVHNAKTKPREEQYASTYRVVSVLTVLHQDW |
| | | | | | LNGKEYKCKVSNKALPAPIEKTISKAKGQPR |
| | | | | | EPQVCTLPPSRDELTKNQVSLSCAVKGFYPS |
| | | | | | DIAVEWESNGQPENNYKTTPPVLDSDGSFFL |
| | | | | | VSKLTVDKSRWQQGMVFSCSVMHEALHNHY |
| | | | | | TQKSLSLSPG |
| | | | | | (SEQ ID NO: 9) |
| AK491 | DNA588 | Knob: | SGP | APTSSSTKKTQL | DKTHTCPPCPAPELLGGPSVFLFPPKPKDT |
| | | hFc(N297A)- | (SEQ ID | QLEYLCLLLQMI | LMISRTPEVTCVVVDVSHEDPEVKFNWYVD |
| | | [VPLSLY]- | NO: 29) | LNGINNYKNPKL | GVEVHNAICTKPREEQYASTYRVVSVLTVL |
| | | hIL2(H16Y, | | TAMLTAKFAMP | HQDWLNGKEYKCKVSNKALPAPIEKTISKA |
| | | L18C, | | KKATELKHLQCL | KGQPREPQVYTLPPCRDELTKNQVSLWCLV |
| | | D20L, R38A, | | EEALKPLEEVLN | KGFYPSDIAVEWESNGQPENNYKTTPPVLD |
| | | F42A, Y45A, | | LAQSKNFHLRPR | SDGSFFLY |
| | | E62A) | | DLISNINVIVLEL | SKLTVDKSRWQQGNVFSCSVMHEALHNHYT |
| | | | | KGSETTFMCEY | QKSLSLSPGGSPGVPLSLYSGPAPTSSSTK |
| | | | | ADETATIVEFLN | KTQLQIEYLCLLLQMILNGINNYKNPKLTA |
| | | | | RWITFCQSIISTL | MLTAKFAMPKKATELKHLQCLEEALKPLEE |
| | | | | T | VLNLAQSKNFHLRPRDLISNINVIVLELKG |
| | | | | (SEQ ID | SETTFMCEYADETATIVEFLNRWITFCQSI |
| | | | | NO: 352) | ISTLT (SEQ ID NO: 404) |
| AK492 | DNA158 | Hole: | | | DKTHTCPPCPAPELLGGPSVFLFPPKPKDTL |
| | | hFc(N297A) | | | MISRTPEVTCVVVDVSHEDPEVKFNWYVDGV |
| | | | | | EVHNAKTKPREEQYASTYRVVSVLTVLHQDW |
| | | | | | LNGKEYKCKVSNKALPAPIEKTISKAKGQPR |
| | | | | | EPQVCTLPPSRDELTKNQVSLSCAVKGFYPS |
| | | | | | DIAVEWESNGQPENNYKTTPPVLDSDGSFFL |
| | | | | | VSKLTVDKSRWQQGMVFSCSVMHEALHNHY |
| | | | | | TQKSLSLSPG |
| | | | | | (SEQ ID NO: 9) |
| AK4921 | DNA589 | Knob: | SGP | APTSSSTKKTQL | DKTHTCPPCPAPELLGGPSVFLFPPKPKDT |
| | | hFc(N297A)- | (SEQ ID | QLEELCLLLQMI | LMISRTPEVTCVVVDVSHEDPEVKFNWWDG |
| | | [VPLSLY]- | NO: 29) | LNGINNYKNPKL | VEVHNAKTKPREEQYASTYRVVSVLTVLHQ |
| | | hIL2(H16E, | | TAMLTAKFAMP | DWLNGKEVKCKVSNKALPAPIFKTISKAKG |
| | | L18C, | | KKATELKHLQCL | QPRFPQVYTLPPCRDELTKNQVSIAVCLVK |
| | | D20L, R38A, | | EEALKPLEEVLN | GFYPSDIAVEWESNGQPENNYKTTPPVLDS |
| | | F42A, Y45A, | | LAQSKNFHLRPR | DGSFFLYSKLTVDKSRWQQGNVFSCSVMHE |
| | | E62A) | | DLISNINVIVLEL | ALHNHYTQKSLSLSPGGSPGVPLSLYSGPA |
| | | | | KGSETTFMCEY | PTSSSTKKTQLQLEELCLLLQMILNGINNY |
| | | | | ADETATIVEFLN | KNPKLT |
| | | | | RWITFCQSIISTL | AMLTAKFAMPKKATELKHLQCLEEALKPLE |
| | | | | T (SEQ ID NO: | EVLNLAQSKNFHLRPRDLISNINVIVLELK |
| | | | | 353) | GSETTFMCEYADETATIVEFLNRWITFCQS |
| | | | | | IISTLT (SEQ ID NO: 405) |
| AK493 | DNA187 | Hole: | | | DKTHTCPPCPAPELLGGPSVFLFPPKPKDT |
| | | hFc(N297A)- | | | LMISRTPEVTCVVVDVSHEDPEVKFNWYVD |
| | | hCD122 | | | GVEVHNAKTKPREEQYASTYRVVSVLTVLH |
| | | | | | QDWLKGKEYKCKVSNKALPAPIEKTISKAK |
| | | | | | GQPREPQVCTLPPSRDELTKNQVSLSCAVK |
| | | | | | GFYPSDIAVEWESNGQPENNYKTTPPVIDS |
| | | | | | DGSFFLVSKLTVDKSRWQQGNVFSCSVMHE |
| | | | | | ALHNHYTQKSLSLSPG |
| | | | | | (SEQ ID NO: 38) |
| AK493 | DNA581 | Knob: | SGP | APTSSSTKKTQL | DKTHTCPPCPAPELLGGPSVFLFPPKPKDT |
| | | hFc(N297A)- | (SEQ ID | QLEHLCLDLQM | LMISRTPEVTCVVVDVSHEDPEVKFNWYVD |
| | | [VPLSLY]- | NO: 29) | ILNGiNNYKNPK | GVEVHNAKTKPREEQYASTYRVVSVLWLHQ |
| | | hIL2(L18C, | | LTAMLTAKFAM | DWLNGKEYKCKVSNKALPAPIEKTISKAKG |
| | | R38A, | | PKKATELKHLQC | QPREPQVYTLPPCRDELTKMQVSLWCLVKG |
| | | F42A, Y45A, | | LEEALKPLEEVL | FYPSDIAVEWESNGQPENNYKTTPPVLDSD |
| | | E62A) | | NLAQSKNFHLR | GSFFLYSKLTVDKSRWQQGNVFSCSVMHEA |
| | | | | PRDLISNINVIVL | LHNHYTQKSLSLSPGGSPGVPLSLYSGPAP |
| | | | | ELKGSETTFMCE | TSSSTKKTQLQLEHLCLDLQMILNGIMNYK |
| | | | | YADETATIVEFL | NPKLTAMLTAKFAMPKKATELKHLQCLEEA |
| | | | | NRWITFCQSIIST | LKPLEEVLNLAQSKNFHLRPRDLISNINVI |
| | | | | LT | VLELKGSETTFMCEYAOETATIVEFLNRWI |
| | | | | (SEQ ID NO: 345) | TFCQSIISTLT (SEQ ID NO: 397) |
| AK494 | DNA187 | Hole: | | | DKTHTCPPCPAPELLGGPSVFLFPPKPKDT |
| | | hFc(N297A)- | | | LMISRTPEVTCVVVDVSHEDPEVKFNWYVD |
| | | hCD122 | | | GVEVHNAKTKPREEQYASTYRVVSVLTVLH |
| | | | | | QDWLKGKEYKCKVSNKALPAPIEKTISKAK |
| | | | | | GQPREPQVCTLPPSRDELTKNQVSLSCAVK |
| | | | | | GFYPSDIAVEWESNGQPENNYKTTPPVIDS |
| | | | | | DGSFFLVSKLTVDKSRWQQGNVFSCSVMHE |
| | | | | | ALHNHYTQKSLSLSPG |
| | | | | | (SEQ ID NO: 38) |
| AK485 | DNA582 | Knob: | SGP | APTSSSTKKTQL | DKTHTCPPCPAPELLGGPSVFLFPPKPKDT |
| | | hFc(N297A)- | (SEQ ID | QLEYLLLDLQMI | LMISRTPEVTCVVVDVSHEDPEVKFNWYVD |
| | | [VPLSLY]- | NO: 29) | LNGINNYKNPKL | GVEVHNAKTKPREEQYASTYRVVSVLTVLH |
| | | hIL2(H16Y, | | TAMLTAKFAMP | QDWLNGKEYKCKVSNKALPAPIEKTISKAK |
| | | R38A, | | KKATELKHLQCL | GQPREPQVYTLPPCRDELTKNQVSLWCLVK |
| | | F42A, Y45A, | | EEALKPLEEVIN | GFYPSDIAVEWESNGQPENNYKTTPPVLDS |
| | | E62A) | | LAQSKNFHLRPR | DGSFFLY |
| | | | | DLISNINVIVLEL | SKLTVDKSRWQQGNVFSCSVMHEALHNHYT |
| | | | | KGSETTFMCEY | QKSISLSPGGSPGVPLSLYSGPAPTSSSTK |
| | | | | ADETATIVEFLN | KTQLQLEYLLLDLQMILNGINNYKNPKLTA |
| | | | | RWITFAQSIISTL | MLTAKFAMPKKATELKHLQCLEEALKPLEE |
| | | | | T | VLNLAQSKNFHLRPRDLISNINVIVLELKG |
| | | | | (SEQ ID NO: 346) | SETTFMCEYADETATIVEFLNRWITFAQSH |
| | | | | | STLT (SEQ ID NO: 398) |
| AK495 | DNA187 | Hole: | | | DKTHTCPPCPAPELLGGPSVFLFPPKPKDT |
| | | hFc(N297A)- | | | LMISRTPEVTCVVVDVSHEDPEVKFNWYVD |
| | | hCD122 | | | GVEVHNAKTKPREEQYASTYRVVSVLTVLH |
| | | | | | QDWLKGKEYKCKVSNKALPAPIEKTISKAK |
| | | | | | GQPREPQVCTLPPSRDELTKNQVSLSCAVK |
| | | | | | GFYPSDIAVEWESNGQPENNYKTTPPVIDS |
| | | | | | DGSFFLVSKLTVDKSRWQQGNVFSCSVMHE |
| | | | | | ALHNHYTQKSLSLSPG |
| | | | | | (SEQ ID NO: 38) |
| AK495 | DNA583 | Knob: | SGP | APTSSSTKKTQL | DKTHTCPPCPAPELLGGPSVFLFPPKPKDT |
| | | hFc(N297A)- | (SEQ ID | QLEELLLDLQMI | LMISRTPEVTCVVVDVS |
| | | [VPLSLY]- | NO: 29) | LNGINNYKNPKL | HEDPEVKFNWYVDGVEVHNAKTKPREEQYA |
| | | hIL2(H16E, | | TAMLTAKFAMP | STYRVVSVLTVLHQDWLNGKEYKCKVSNKA |
| | | R38A, F42A, | | KKATELKHLQCL | LPAPIEKTISKAKGQPREPQVYTLPPCRDE |
| | | Y45A, E52A, | | EEALKPLEEVIN | LTKNQVSLW |
| | | Cl25A) | | LAQSKNFHLRPR | CLVKGFYPSDIAVEWESNGQPENNYIOTPP |
| | | | | DLISNINVIVLEL | VLDSDGSFFLYSKLTVDKSRWQQGNVFSCS |
| | | | | KGSETTFMCEY | VMHEALHNHYTQKSLSLSPGGSPGVPLSLY |
| | | | | ADETATIVEFLN | SGPAPTSSSTKKTQLQLEELLLDLQMILNG |
| | | | | RWITFAQSIISTL | INNYKNPKLTAMLTAKFAMPKKATELKHLQ |
| | | | | T | CLEEALKPLEEVLNLAQSKNFHLRPRDLISN |
| | | | | (SEQ ID NO: 347) | INVIVLELKGSETTFMCEYADETATIVEFL |
| | | | | | NRWITFAQSIISTLT |
| | | | | | (SEQ ID NO: 399) |
| AK496 | DNA187 | Hole: | | | DKTHTCPPCPAPELLGGPSVFLFPPKPKDT |
| | | hFc(N297A)- | | | LMISRTPEVTCVVVDVSHEDPEVKFNWYVD |
| | | hCD122 | | | GVEVHNAKTKPREEQYASTYRVVSVLTVLH |
| | | | | | QDWLKGKEYKCKVSNKALPAPIEKTISKAK |
| | | | | | GQPREPQVCTLPPSRDELTKNQVSLSCAVK |
| | | | | | GFYPSDIAVEWESNGQPENNYKTTPPVIDS |
| | | | | | DGSFFLVSKLTVDKSRWQQGNVFSCSVMHE |
| | | | | | ALHNHYTQKSLSLSPG |
| | | | | | (SEQ ID NO: 38) |
| AK496 | | Knob: | SGP | APTSSSTKKTQL | DKTHTCPPCPAPELLGGPSVFLFPPKPKDT |
| | | hFc(N297A)- | (SEQ ID | QLEHLLLLLQMI | LMISRTPEVTCVVVDVSHEDPEVKFNWYVD |
| | | [VPLSLY]- | NO: 29) | LNGINNYKNPKL | GVEVHNAKTKPREEQYASTYRVVSVLTVLH |
| | | hIL2,(D20L, | | TAMLTAKFAMP | QDWLNGKEYKCKVSNKALPAPIEKTISKAK |
| | | R38A, F42A, | | KKATELKHLQCL | GQPREPQVYTLPPCRDELTKNQVSLWCLVK |
| | | Y45A, E62A, | | EEALKPLEEVIN | GFYPSDIAVEWESNGQPENNYKTTPPVLDS |
| | | C125A) | | LAQSKNFHLRPR | DGSFFLYSKLTVDKSRWQQGNVFSCSVMHE |
| | | | | DLISNINVIVLEL | ALHNHYTQKSLSLSPGGSPGVPLSLYSGPA |
| | | | | KGSETTFMCEY | PTSSSTKKTQLQLEHLLLLLQMILNGINNY |
| | | | | ADETATIVEFLN | KNPKLTAMLTAKFAMPKKATELKHLQCLEE |
| | | | | RWITFAQSIISTL | ALKPLEEVLNLAQSKNFHLRPRDLISNINV |
| | | | | T | IVLELKGSETTFMCEYADETATIVEFLNRW |
| | | | | (SEQ ID NO: | ITFAQSIISTLT (SEQ ID NO: 400) |
| | | | | 348) | |
| AK497 | DNA187 | Hole: | | | DKTHTCPPCPAPELLGGPSVFLFPPKPKDT |
| | | hFc(N297A)- | | | LMISRTPEVTCVVVDVSHEDPEVKFNWYVD |
| | | hCD122 | | | GVEVHNAKTKPREEQYASTYRVVSVLTVLH |
| | | | | | QDWLKGKEYKCKVSNKALPAPIEKTISKAK |
| | | | | | GQPREPQVCTLPPSRDELTKNQVSLSCAVK |
| | | | | | GFYPSDIAVEWESNGQPENNYKTTPPVIDS |
| | | | | | DGSFFLVSKLTVDKSRWQQGNVFSCSVMHE |
| | | | | | ALHNHYTQKSLSLSPG |
| | | | | | (SEQ ID NO: 38) |
| AK497 | DNA585 | Knob: | SGP | APTSSSTKKTQL | DKTHTCPPCPAPELLGGPSVFLFPPKPKDT |
| | | hFc(N297A)- | (SEQ ID | QLEYLCLDLQMI | LMISRTPEVTCVVVDVSHEDPEVKFNWYVD |
| | | [VPLSLY]- | NO: 29) | LNGiNNYKNPKL | GVEVHNAKTKPREEQYASTYRVVSVLTVLH |
| | | hIL2(H16Y, | | TAMLTAKFAMP | QDWLNGKEYKCKVSNKALPAPIEKTISKAK |
| | | R38A, F42A, | | KKATELKHLQCL | GQPREPQVYTLPPCRDELTKNQVSLWCLVK |
| | | Y45A, E52A, | | EEALKPLEEVLN | GFYPSDIAVEWESNGQPENNYKTTPPVLDS |
| | | Cl25A) | | LAQSKNFHLRPR | DGSFFLYSKLTVDKSRWQQGNVFSCSVMHE |
| | | | | DLISNINVIVLEL | ALHNHYTQKSLSLSPGGSPGVPLSLYSGPA |
| | | | | KGSETTFMCEY | PTSSSTKKTQLQLEYLCLDLQMILNGINNY |
| | | | | ADETATIVEFLN | KNPKLTAMLTAKFAMPKKATELKHLQCLEE |
| | | | | RWITFCQSIISTL | ALKPLEEVLNLAQSKNFHLRPRDLISNINV |
| | | | | T | IVLELKGSETTFMCEYADETATIVEFLNRW |
| | | | | (SEQ ID NO: | ITFCQSIISTLT (SEQ ID NO: 401) |
| | | | | 349) | |
| AK498 | DNA187 | Hole: | | | DKTHTCPPCPAPELLGGPSVFLFPPKPKDT |
| | | hFc(N297A)- | | | LMISRTPEVTCVVVDVSHEDPEVKFNWYVD |
| | | hCD122 | | | GVEVHNAKTKPREEQYASTYRVVSVLTVLH |
| | | | | | QDWLKGKEYKCKVSNKALPAPIEKTISKAK |
| | | | | | GQPREPQVCTLPPSRDELTKNQVSLSCAVK |
| | | | | | GFYPSDIAVEWESNGQPENNYKTTPPVIDS |
| | | | | | DGSFFLVSKLTVDKSRWQQGNVFSCSVMHE |
| | | | | | ALHNHYTQKSLSLSPG |
| | | | | | (SEQ ID NO: 38) |
| AK498 | DNA586 | Knob: | SGP | APTSSSTKKTQL | DKTHTCPPCPAPELLGGPSVFLFPPKPKDT |
| | | hFc(N297A)- | (SEQ ID | QLEELCLDLQMI | LMISRTPEVTCVVVDVSHEOPEV |
| | | [VPLSLY]- | NO: 29) | LNGINNYKNPKL | KFNWYVDGVEVHNAKTKPREEQYASTYRVV |
| | | hIL2(H16E, | | TAMLTAKFAMP | SVLTVLHQDVVLNGKEYKCKVSNKALPAPI |
| | | L18C, R38A, | | KKATELKHLQCL | EKTISKAKGQPREPQVYTLPPCRDELTKNQ |
| | | F42A, Y45A, | | EEALKPLEEVLN | VSLWCLVKGFYPSDIAVEWESNGQPEN |
| | | E62A) | | LAQSKNFHLRPR | NYKTTPPVLDSDGSFFLYSKLTVDKSRWQQ |
| | | | | DLISNINVIVLEL | GNVFSCSVMHEALHNHYTQKSLSLSPGGSP |
| | | | | KGSETTFMCEY | GVPLSLYSGPAPTSSSTKKTQLQLEELCLD |
| | | | | ADETATIVEFLN | LQMILNGINNYKNPKLTAMLTAKFAMPKKA |
| | | | | RWITFCQSIISTL | TELKHLQCLEEALKPLEEVLNLAQSKNFHL |
| | | | | (SEQ ID NO: | RPRDLISNINVIVLELKGSETTFMCEYADE |
| | | | | 350) | TATIVEFLNRWITFCQSIISTLT |
| | | | | | (SEQ ID NO: 402) |
| AK499 | DNA187 | Hole: | | | DKTHTCPPCPAPELLGGPSVFLFPPKPKDT |
| | | hFc(N297A)- | | | LMISRTPEVTCVVVDVSHEDPEVKFNWYVD |
| | | hCD122 | | | GVEVHNAKTKPREEQYASTYRVVSVLTVLH |
| | | | | | QDWLKGKEYKCKVSNKALPAPIEKTISKAK |
| | | | | | GQPREPQVCTLPPSRDELTKNQVSLSCAVK |
| | | | | | GFYPSDIAVEWESNGQPENNYKTTPPVIDS |
| | | | | | DGSFFLVSKLTVDKSRWQQGNVFSCSVMHE |
| | | | | | ALHNHYTQKSLSLSPG |
| | | | | | (SEQ ID NO: 38) |
| AK499 | DNA587 | Knob: | SGP | APTSSSTKKTQL | DKTHTCPPCPAPELLGGPSVFLFPPKPKDT |
| | | hFc(N297A)- | (SEQ ID | QLEHLCLLLQMI | LMISRTPEVTCVVVDVSHEDPEVKFNWYVD |
| | | [VPLSLY]- | NO: 29) | LNGINNYKNPKL | GVEVHNAKTKPREEQYASTYRVVSVLTVLH |
| | | hIL2(L18C, | | TAMLTAKFAMP | QPWLNGKEYKCKVSNKALPAPIEKTISKAK |
| | | D20L, R38A, | | KKATELKHLQCL | GQPREPQVYTLPPCRDELTKMQVSLWCLVK |
| | | F42A, Y45A, | | EEALKPLEEVLN | GFYPSDIAVEWESMGQPENNYKTTPPVLDS |
| | | E62A) | | LAQSKNFHLRPR | DGSFFLYSKLTVDKSRWQQGNVFSCSVMHE |
| | | | | DLISNINVIVLEL | ALHNHYTQKSLSLSPGGSPGVPLSLYSGPA |
| | | | | KGSETTFMCEY | PTSSSTKKTQLQLEHLCLLLQMILNGINNY |
| | | | | ADETATIVEFLN | KNPKLTAMLTAKFAMPKKATELKHLQCLEE |
| | | | | RWITFCQSIISTL | ALKPLEEVLNLAQSKNFHLRPRDLISNINV |
| | | | | T | IVLELKGSETTFMCBYADETATIVEFLNRW |
| | | | | (SEQ ID NO: 351) | ITFCQSIISTLT (SEQ ID NO: 403) |
| AK500 | DNA187 | Hole: | | | DKTHTCPPCPAPELLGGPSVFLFPPKPKDT |
| | | hFc(N297A)- | | | LMISRTPEVTCVVVDVSHEDPEVKFNWYVD |
| | | hCD122 | | | GVEVHNAKTKPREEQYASTYRVVSVLTVLH |
| | | | | | QDWLKGKEYKCKVSNKALPAPIEKTISKAK |
| | | | | | GQPREPQVCTLPPSRDELTKNQVSLSCAVK |
| | | | | | GFYPSDIAVEWESNGQPENNYKTTPPVIDS |
| | | | | | DGSFFLVSKLTVDKSRWQQGNVFSCSVMHE |
| | | | | | ALHNHYTQKSLSLSPG |
| | | | | | (SEQ ID NO: 38) |
| AK500 | DNA588 | Knob: | SGP | APTSSSTKKTQL | DKTHTCPPCPAPELLGGPSVFLFPPKPKDT |
| | | hFc(N297A)- | (SEQ ID | QLEYLCLLLQMI | LMISRTPEVTCVVVDVSHEDPEVKFNWYVD |
| | | [VPLSLY]- | NO: 29) | LNGINNYKNPKL | GVEVHNAICTKPREEQYASTYRVVSVLTVL |
| | | hIL2(H16Y, | | TAMLTAKFAMP | HQDWLNGKEYKCKVSNKALPAPIEKTISKA |
| | | L18C, | | KKATELKHLQCL | KGQPREPQVYTLPPCRDELTKNQVSLWCLV |
| | | D20L, R38A, | | EEALKPLEEVLN | KGFYPSDIAVEWESNGQPENNYKTTPPVLD |
| | | F42A, Y45A, | | LAQSKNFHLRPR | SDGSFFLY |
| | | E62A) | | DLISNINVIVLEL | SKLTVDKSRWQQGNVFSCSVMHEALHNHYT |
| | | | | KGSETTFMCEY | QKSLSLSPGGSPGVPLSLYSGPAPTSSSTK |
| | | | | ADETATIVEFLN | KTQLQIEYLCLLLQMILNGINNYKNPKLTA |
| | | | | RWITFCQSIISTL | MLTAKFAMPKKATELKHLQCLEEALKPLEE |
| | | | | T | VLNLAQSKNFHLRPRDLISNINVIVLELKG |
| | | | | (SEQ ID | SETTFMCEYADETATIVEFLNRWITFCQSI |
| | | | | NO: 352) | ISTLT (SEQ ID NO: 404) |
| AK501 | DNA187 | Hole: | | | DKTHTCPPCPAPELLGGPSVFLFPPKPKDT |
| | | hFc(N297A)- | | | LMISRTPEVTCVVVDVSHEDPEVKFNWYVD |
| | | hCD122 | | | GVEVHNAKTKPREEQYASTYRVVSVLTVLH |
| | | | | | QDWLKGKEYKCKVSNKALPAPIEKTISKAK |
| | | | | | GQPREPQVCTLPPSRDELTKNQVSLSCAVK |
| | | | | | GFYPSDIAVEWESNGQPENNYKTTPPVIDS |
| | | | | | DGSFFLVSKLTVDKSRWQQGNVFSCSVMHE |
| | | | | | ALHNHYTQKSLSLSPG |
| | | | | | (SEQ ID NO: 38) |
| AK501 | DNA187 | Hole: | | | DKTHTCPPCPAPELLGGPSVFLFPPKPKDT |
| | | hFc(N297A)- | | | LMISRTPEVTCVVVDVSHEDPEVKFNWYVD |
| | | hCD122 | | | GVEVHNAKTKPREEQYASTYRVVSVLTVLH |
| | | | | | QDWLKGKEYKCKVSNKALPAPIEKTISKAK |
| | | | | | GQPREPQVCTLPPSRDELTKNQVSLSCAVK |
| | | | | | GFYPSDIAVEWESNGQPENNYKTTPPVIDS |
| | | | | | DGSFFLVSKLTVDKSRWQQGNVFSCSVMHE |
| | | | | | ALHNHYTQKSLSLSPG |
| | | | | | (SEQ ID NO: 38) |
| AK501 | DNA589 | Knob: | SGP | APTSSSTKKTQL | DKTHTCPPCPAPELLGGPSVFLFPPKPKDT |
| | | hFc(N297A)- | (SEQ ID | QLEELCLLLQMI | LMISRTPEVTCVVVDVSHEDPEVKFNWWDG |
| | | [VPLSLY]- | NO: 29) | LNGINNYKNPKL | VEVHNAKTKPREEQYASTYRVVSVLTVLHQ |
| | | hIL2(H16E, | | TAMLTAKFAMP | DWLNGKEVKCKVSNKALPAPIFKTISKAKG |
| | | L18C, | | KKATELKHLQCL | QPRFPQVYTLPPCRDELTKNQVSIAVCLVK |
| | | D20L, R38A, | | EEALKPLEEVLN | GFYPSDIAVEWESNGQPENNYKTTPPVLDS |
| | | F42A, Y45A, | | LAQSKNFHLRPR | DGSFFLYSKLTVDKSRWQQGNVFSCSVMHE |
| | | E62A) | | DLISNINVIVLEL | ALHNHYTQKSLSLSPGGSPGVPLSLYSGPA |
| | | | | KGSETTFMCEY | PTSSSTKKTQLQLEELCLLLQMILNGINNY |
| | | | | ADETATIVEFLN | KNPKLT |
| | | | | RWITFCQSIISTL | AMLTAKFAMPKKATELKHLQCLEEALKPLE |
| | | | | T (SEQ ID NO: | EVLNLAQSKNFHLRPRDLISNINVIVLELK |
| | | | | 353) | GSETTFMCEYADETATIVEFLNRWITFCQS |
| | | | | | IISTLT (SEQ ID NO: 405) |
| AK502 | DNA543 | Knob: | | AVNGTSQFTCF | DKTHTCPPCPAPELLGGPSVFLFPPKPKDTL |
| | | hFc(N297A)- | | YNSRANISCVW | MISRTPEVTCVVVDVSHEDPEVKFNWWDGV |
| | | [VPLSLY]- | | SQDGALQDTSC | EVHNAKTKPREEQYASTYRVVSVLWLHQDW |
| | | hCD122 | | QVHAWPDRRR | LNGKEYKCKVSNKALPAPIEKTISKAKGQP |
| | | | | WNQTCELLPVS | REPQVCTLPPSRDELTKNQVSLSCAVKGFY |
| | | | | QASWACNLILG | PSDIAVEWESNGQPENNYKTTPPVLDSDGS |
| | | | | APDSQKLTTVDI | FFLVSKLTVDKSRWQQGNVFSCSVMHEALH |
| | | | | VTLRVLCREGVR | NHYTQKSLSLSPGGPPSGSSPGVPLSLYGS |
| | | | | WRVMAIQDFK | QGGAVNGTSQFTCFYNSRANISCVWSQDGA |
| | | | | PFENLRLMAPIS | LQDTSCQVHAWPDRRRWNQTCELLPVSQAS |
| | | | | LQVVHVETHRC | WACNLILGAPDSQKLTTVDIVTLRVLCREG |
| | | | | NISWEISQASHY | VRWRVMAIQDFKPFENLRLMAPISLQVVHVE |
| | | | | FERHLEFEARTL | THRCNISWEISQASHYFERHLEFEARTISP |
| | | | | SPGHTWEEAPL | GHTWEEAPLLLIKQKQEWICLETITPDTQYE |
| | | | | LTLKQKQEWICL | FQVRVKPLQGEFTTWSPWSQPLAFRTKPAA |
| | | | | ETLTPDTQYEFQ | LGKD (SEQ ID NO: 42) |
| | | | | VRVKPLQGEFTT | |
| | | | | WSPWSQPLAFR | |
| | | | | TKPAALGKD | |
| | | | | (SEQ ID NO: 4) | |
| AK502 | DNA577 | Knob: | | | DKTHTCPPCPAPELLGGPSVFLFPPKPKDT |
| | | hFc(N297, | | | LMASRTPEVTCVVVDVSHEDPEVKFNWYVD |
| | | I253A)- | | | GVEVHNAKTKPREEQYASTYRVVSVLTVLH |
| | | hIL2 | | | QDWLNGKEYKCKVSNKAIPAPIEKTISKAK |
| | | (R38A, | | | GQPREPQVYTLPPCRDELTKNQVSLWCLVK |
| | | F42A, | | | GFYPSDIAVEWESNGQPENNYKTTPPVLDS |
| | | Y45A, | | | DGSFFLYSKLTVDKSRWQQGNVFSCSVMHE |
| | | E62A, | | | ALHNHYTQKSLSLSPGGGSSPPGGGSSGGG |
| | | C125A) | | | SGPAPTSSSTKKTQLQLEHLLLDLQMILNG |
| | | | | | INNYKNPKLTAMLTAKFAMPKKATELKHLQ |
| | | | | | CLEEALKPLEEVLNIAQSKNFHLRPRDIIS |
| | | | | | NINVIVLELKGSETTFMCEYADETATIVEF |
| | | | | | LNRWITFAQSIISTLT |
| | | | | | (SEQ ID NO: 393) |
| AK503 | DNA255 | Knob: | | | DKTHTCPPCPAPELLGGPSVFLFPPKPKDT |
| | | hFc | | | LMISRTPEVTCVVVDVSHEDPEVKFNWYVD |
| | | (N297A)- | | | GVEVHNAKTKPREEQYASTYRVVSVLTVLH |
| | | hIL2 | | | QDWLNGKEYKCKVSNKALPAPIEKTISKAK |
| | | (R38A, | | | GQPREPQVYTLPPCRDELTKNQVSLWCLVK |
| | | F42A, | | | GFYPSDIAVEWESMGQPENNYKTTPPVLDS |
| | | Y45A, | | | DGSFFLYSKLTVDKSRWQQGNVFSCSVMHE |
| | | E62A, | | | ALHNHYTQKSLSLSPGGGSSPPGGGSSGGG |
| | | C125A) | | | SGPAPTSSSTKKTQLQLEHLLLDLQMILNG |
| | | | | | INNYKNPKLTAMLTAKFAMPKKATELKHLQ |
| | | | | | CLEEALKPLEEVLNLAQSKNFHLRPRDLISN |
| | | | | | INVIVLELKGSETTFMCEYADETATIVEFL |
| | | | | | NRWITFAQSIISTLT |
| | | | | | (SEQ ID NO: 51) |
| AK503 | DNA506 | | | AVNGTSQFTCF | DKTHTCPPCPAPELLGGPSVFLFPPKPKDTL |
| | | | | YNSRANISCVW | MISRTPEYTCVVVDVSHEDPEVKFNWYVDG |
| | | | | SQDGALQDTSC | VEVHNAKTKPREEQYASTYRVVSVLTVLHQ |
| | | | | QVHAWPDRRR | DWLNGKEYKCKVSNKALPAPIEKTISKAKG |
| | | | | WNQTCELLPVS | QPREPQVCTLPPSRDELTKNQVSLSCAVKG |
| | | | | QASWACNLILG | FYPSDIAVEWESMGQPENNYKTTPPVLDSD |
| | | | | APDSQKLTTVDI | GSFFLVSKLTVDKSRWQQGNVFSCSVMHEA |
| | | | | VTLRVLCREGVR | LHNHYTQKSLSLSPGGPPSGSSPRAAAVKS |
| | | | | WRVMAIQDFK | PSGGGAVNGTSQFTCFYNSRANISCVLVSQ |
| | | | | PFENLRLMAPIS | OGALQDTSCQVHAWPDRRRWNQTCELLPVS |
| | | | | LQVVHVETHRC | QASWACNLILGAPDSQKLTTVDIVTLRVLC |
| | | | | NISWEISQASHY | REGVRWRVMAIQDFKPFENLRLMAPISLQV |
| | | | | FERHLEFEARTL | VHVETHRCNISWEISQASHYFERHLEFEAR |
| | | | | SPGHTWEEAPL | TLSPGHTWEEAPLLTLKQKQEWICLETLTP |
| | | | | LTLKQKQEWICL | DTQYEFQVRVKPLQGEFITWSPWSQPLAFR |
| | | | | ETLTPDTQYEFQ | TKPAALGKD (SEQ ID NO: 409) |
| | | | | VRVKPLQGEFTT | |
| | | | | WSPWSQPLAFR | |
| | | | | TKPAALGKD | |
| | | | | (SEQ ID NO: 4) | |
| AK504 | DNA603 | Hole: | | | ESKYGPPCPPCPAPEFLGGPSVFLFPPKPK |
| | | hFcIgG4- | | | DTLMISRTPEVTCVVVDVSQEDPEVQFNWY |
| | | hCD122 | | | VDGVEVHNAKTKPREEQFNSTYRVVSVLTV |
| | | | | | LHQDWLNGKEYKCKVSNKGLPSSIEKTISK |
| | | | | | AKGQPREPQVCTLPPSQEEMTKNQVSLSCA |
| | | | | | VKGFYPSDIAVEWESNGQPENNYKTTPPVL |
| | | | | | DSDGSFFLYSRLTVDKSRWQEGNVFSCSVM |
| | | | | | HEALHNHYTQKSLSLSL |
| | | | | | GPGSGSAVNGTSQFTCFYNSRANISCVWSQ |
| | | | | | DGALQDTSCQVHAWPDRRRWNQTCELLPVS |
| | | | | | QASWACNLILGAPDSQKLTTVDIVTLRVLC |
| | | | | | REGVRWRVMAIQDFKPFENLRLMAPISLQW |
| | | | | | HVETHRCNISW |
| | | | | | EISQASHYFERHLEFEARTLSPGHTWEEAP |
| | | | | | LLTLKQKQEWICLETLTPDTQYEFQVRVKP |
| | | | | | LQGEFTTWSPWSQPLAFRTKPAALGKD |
| | | | | | (SEQ ID NO: 406) |
| AK504 | DNA605 | Knob: | SGP | APTSSSTKKTQL | ESKYGPPCPPCPAPEFLGGPSVFLFPPKPK |
| | | hFcIgG4-hIL2- | (SEQ ID | QLEHLLLDLQMI | DTLMISRTPEVTCVVVDVSQEDPEVQFNWY |
| | | [VPLSLY]- | NO: 29) | LNGINNYKNPKL | VDGVEVHNAKTKPREEQFNSTYRVVSVLTV |
| | | hIL2(R38A, | | TAMLTAKFAMP | LHQDWLMGKEYKCKVSNKGLPSSIEKTISK |
| | | F42A, Y45A, | | KKATELKHLQCL | AKGQPREPQVYTLPPCQEEMTKNQVSLWCL |
| | | E62A, C125A) | | EEALKPLEEVLN | VKGFYPSDIAVEWESMGQPENNYKTTPPVL |
| | | | | LAQSKNFHLRPR | DSDGSFFLYSRLTVDKSRWQEGNVFSCSVM |
| | | | | DLISNINVIVL | HEALHNHYTQKSLSLSLGGSPGVPLSLYSG |
| | | | | ELKGSETTFMC | PAPTSSSTKKTQLQLEHLLLDLQMILNGIN |
| | | | | EYADETATIVEF | NYKNPKLTAMLTAKFAMPKKATELKHLQCL |
| | | | | LNRWITFAQSII | EEALKPLEEVLNLAQSKNFHLRPRDLISNI |
| | | | | STLT | NVIVLELKGSETTFMCEYAOETATIVEFLN |
| | | | | (SEQ ID | RWITFAQSIISTLT (SEQ ID NO: 408) |
| | | | | NO: 3) | |
| AK504 | DNA603 | Hole: | | | ESKYGPPCPPCPAPEFLGGPSVFLFPPKPK |
| | | hFcIgG4- | | | DTLMISRTPEVTCVVVDVSQEDPEVQFNWY |
| | | hCD122 | | | VDGVEVHNAKTKPREEQFNSTYRVVSVLTV |
| | | | | | LHQDWLNGKEYKCKVSNKGLPSSIEKTISK |
| | | | | | AKGQPREPQVCTLPPSQEEMTKNQVSLSCA |
| | | | | | VKGFYPSDIAVEWESNGQPENNYKTTPPVL |
| | | | | | DSDGSFFLYSRLTVDKSRWQEGNVFSCSVM |
| | | | | | HEALHNHYTQKSLSLSL |
| | | | | | GPGSGSAVNGTSQFTCFYNSRANISCVWSQ |
| | | | | | DGALQDTSCQVHAWPDRRRWNQTCELLPVS |
| | | | | | QASWACNLILGAPDSQKLTTVDIVTLRVLC |
| | | | | | REGVRWRVMAIQDFKPFENLRLMAPISLQW |
| | | | | | HVETHRCNISW |
| | | | | | EISQASHYFERHLEFEARTLSPGHTWEEAP |
| | | | | | LLTLKQKQEWICLETLTPDTQYEFQVRVKP |
| | | | | | LQGEFTTWSPWSQPLAFRTKPAALGKD |
| | | | | | (SEQ ID NO: 406) |
| AK504 | DNA604 | Knob: | | | ESKYGPPCPPCPAPEFLGGPSVFLFPPKPK |
| | | IgG4 | | | DTLMISRTPEVTCVVVDVSQEDPEVQFNWY |
| | | hFc- | | | VDGVEVHNAKTKPREEQFNSTYRVVSVLTV |
| | | hIL2(R38A, | | | LHQDWLNGKEYKCKVSNKGLPSSIEKTISK |
| | | F42A, Y45A, | | | AKGQPREPQVYTLPPCQEEMTKNQVSLWCL |
| | | E62A, C125A) | | | VKGFYPSDIAVEWESNGQPENNYKTTPPVL |
| | | | | | DSDGSFFLYSRLTVDKSRWQEGNVFSCSVM |
| | | | | | HEALHNHYTQKSLSLSLGGGSSPPGGGSSG |
| | | | | | GGSGPAPTSSSTKKTQLQLEHLLLDLQMIL |
| | | | | | NGINNYKNPKLTAMLTAKFAMPKKATELKH |
| | | | | | LQCLEEALKPLEEVLNLAQSKNFHLRPRDL |
| | | | | | ISNINVIVLELKGSETTFMCEYADETATIV |
| | | | | | EFLNRWITFAQSIISTLT |
| | | | | | (SEQ ID NO: 407) |
| AK508 | DNA577 | Knob: | | | DKTHTCPPCPAPELLGGPSVFLFPPKPKDT |
| | | hFc(N297, | | | LMASRTPEVTCVVVDVSHEDPEVKFNWYVD |
| | | I253A)- | | | GVEVHNAKTKPREEQYASTYRVVSVLTVLH |
| | | hIL2 | | | QDWLNGKEYKCKVSNKAIPAPIEKTISKAK |
| | | (R38A, | | | GQPREPQVYTLPPCRDELTKNQVSLWCLVK |
| | | F42A, | | | GFYPSDIAVEWESNGQPENNYKTTPPVLDS |
| | | Y45A, | | | DGSFFLYSKLTVDKSRWQQGNVFSCSVMHE |
| | | E62A, | | | ALHNHYTQKSLSLSPGGGSSPPGGGSSGGG |
| | | C125A) | | | SGPAPTSSSTKKTQLQLEHLLLDLQMILNG |
| | | | | | INNYKNPKLTAMLTAKFAMPKKATELKHLQ |
| | | | | | CLEEALKPLEEVLNIAQSKNFHLRPRDIIS |
| | | | | | NINVIVLELKGSETTFMCEYADETATIVEF |
| | | | | | LNRWITFAQSIISTLT |
| | | | | | (SEQ ID NO: 393) |
| AK508 | DNA609 | Hole: | GSGGG | AVNGTSQFTCF | DKTHTCPPCPAPELLGGPSVFLFPPKPKDTL |
| | | hFc(N297A, | (SEQ | YNSRANISCVW | MASRTPEVTCVVVDVSHEDPEVKFNWWDGV |
| | | I253A)- | ID | SQDGALQDTSC | EVHNAKTKPREEQYASTYRVVSVLTVLHQD |
| | | [VPLSLY]- | NO: | QVHAWPDRRR | WLNGKEYKCKVSNKALPAPIEKTISKAKGQ |
| | | hCD122 | 31) | WNQTCELLPVS | PREPQVCTLPPSRDELTKNQVSLSCAVKGF |
| | | | | QASWACNLILG | YPSDIAVEVVESNGQPENNYKTTPPVLDSD |
| | | | | APDSQKLTTVDI | 6SFFLVSKLTVDKSRWQQGNVFSCSVMHEAL |
| | | | | VTLRVLCREGVR | HNHYTQKSLSLSPGGPPSGSSPGVPLSLYG |
| | | | | WRVMAIQDFK | SGGGAVNGTSQFTCFYNSRANISCVWSQDG |
| | | | | PFENLRLMAPIS | ALQDTSCQVHAWPDRRRWNQTC |
| | | | | LQVVHVETHRC | ELLPVSQASWACNLILGAPDSQKLTTVDIV |
| | | | | NISWEISQASHY | TLRVLCREGVRWRVMAIQDFKPFENLRLMA |
| | | | | FERHLEFEARTL | PISLQVVHVETHRCNISWEISQASHYFERH |
| | | | | SPGHTWEEAPL | LEFEARTLSPGHTWEEAPLLTLKQKQEWIC |
| | | | | LTLKQKQEWICL | LETLTPDTQYEFQVRVKPLQGEFTTWSPWS |
| | | | | ETLTPDTQYEFQ | QPLAFRTKPAALGKD |
| | | | | VRVKPLQGEFTT | (SEQ ID NO: 411) |
| | | | | WSPWSQPLAFR | |
| | | | | TKPAALGKD | |
| | | | | (SEQ ID NO: 4) | |
| AK509 | DNA575 | Hole: | | | DKTHTCPPCPAPELLGGPSVFLFPPKPKDT |
| | | hFc(N297A, | | | LMASRTPEVTCVVVDVSHEDPEVKFNWYVD |
| | | I253A)- | | | GVEVHNAIOKPREEQYASTYRVVSVLTVLH |
| | | hCD122 | | | QDWLNGKEYKCKVSNKALPAPIEKTISKAK |
| | | | | | GQPREPQVCTLPPSRDELTKNQVSLSCAVK |
| | | | | | GFYPSDIAVEWESNGQPENNYKTTPPVLDS |
| | | | | | DGSFFLVSKLTVDKSRWQQGNVFSCSVMHE |
| | | | | | ALHNHYTQKSLSLSPGPGSGSAVNGTSQFT |
| | | | | | CFYNSRANISCVWSQDGALQDTSCQVHAWP |
| | | | | | DRRRWNQTCELLPVSQASWACNLILGAPDS |
| | | | | | QKLTTVDIVTLRVLCREGVRWRVMAIQPFK |
| | | | | | PFENLRIMAPISLQVVHVETHRCNISWEIS |
| | | | | | QASHYFERHLEFEARTLSPGHTWEEAPLLT |
| | | | | | LKQKQEWICLETLTPDTQYEFQVRVKPLQG |
| | | | | | EFTTVVSPVVSQPLAFRTKPAALGKD |
| | | | | | (SEQ ID NO: 43) |
| AK509 | DNA623 | Knob: | SGP | APTSSSTKKTQL | DKTHTCPPCPAPELLGGPSVFLFPPKPKDTL |
| | | hFc(N297, | (SEQ | QLEHLLLDLQMI | MASRTPEVTCVVVDVSHEDPEVKFNWYVDG |
| | | I253A)- | ID | LNGINNYKNPKL | VEVHNAKTKPREEQYASTYRVVSVLTVLHQ |
| | | [MPYDLYHP] | NO: | TAMLTAKFAMP | PWLNGKEYKCKVSNKALPAPIEKTISKAKG |
| | | hIL2 | 29) | KKATELKHLQCL | QPREEQVYTLPPCRDELTKNQVSLWCLVKG |
| | | (R38A, | | EEALKPLEEVLN | FYPSDIAVEWESNGQPENNYKTTPPVLDSD |
| | | F42A, | | LAQSKNFHLRPR | GSFFLYSKLTVDKSRWQQGNVFSCSVMHEA |
| | | Y45A, | | DLISNINVIVL | LHNHYTOKSLSLSPGGGSSPPMPYDLYHPS |
| | | E62A, | | ELKGSETTFMC | GPAPTSSSTKKTQLQLEHLLLDLQMILNGI |
| | | C125A) | | EYADETATIVEF | NNYKNPKLTAMLTAKFAMPKKATELKHLQC |
| | | | | LNRWITFAQSII | LEEALXPLEEVLNLAQSKNFHLRPRDLISN |
| | | | | STLT | INVIVLELKGSETTFMCEYADETATIVEFL |
| | | | | (SEQ ID | NRWITFAQSIISTLT |
| | | | | NO: 3) | (SEQ ID NO: 415) |
| AK510 | DNA577 | Knob: | | | DKTHTCPPCPAPELLGGPSVFLFPPKPKDT |
| | | hFc(N297A, | | | LMASRTPEVTCVVVDVSHEDPEVKFNWYVD |
| | | I253A)- | | | GVEVHNAKTKPREEQYASTYRVVSVLTVLH |
| | | hIL2 | | | QDWLNGKEYKCKVSNKAIPAPIEKTISKAK |
| | | (R38A, | | | GQPREPQVYTLPPCRDELTKNQVSLWCLVK |
| | | F42A, | | | GFYPSDIAVEWESNGQPENNYKTTPPVLDS |
| | | Y45A, | | | DGSFFLYSKLTVDKSRWQQGNVFSCSVMHE |
| | | E62A, | | | ALHNHYTQKSLSLSPGGGSSPPGGGSSGGG |
| | | C125A) | | | SGPAPTSSSTKKTQLQLEHLLLDLQMILNG |
| | | | | | INNYKNPKLTAMLTAKFAMPKKATELKHLQ |
| | | | | | CLEEALKPLEEVLNIAQSKNFHLRPRDIIS |
| | | | | | NINVIVLELKGSETTFMCEYADETATIVEF |
| | | | | | LNRWITFAQSIISTLT |
| | | | | | (SEQ ID NO: 393) |
| AK510 | DNA608 | Hole: | SGGG | AVNGTSQFTCF | DKTHTCPPCPAPELLGGPSVFLFPPKPKDTL |
| | | hFc(N297A, | (SEQ | YNSRANISCVW | MASRTPEVTCVVVDVSHEDPEVKFNWYVDG |
| | | I253A)- | ID | SQDGALQDTSC | VEVHNAKTKPREEQYASTYRVVSVLTVLHQ |
| | | [MPYDLYHP]- | NO: | QVHAWPDRRR | DWLNGKEYKCKVSNKALPAPIEKTISKAKG |
| | | hCD122 | 30) | WNQTCELLPVS | OPREPQVCTLPPSRDELTKNQVSLSCAVKG |
| | | | | QASWACNLILG | FYPSDIAVEWESNGQPENNYKTTPPVLDSD |
| | | | | APDSQKLTTVDI | GSFFLVSKLTVDKSRWQQGNVFSCSVMHEA |
| | | | | VTLRVLCREGVR | LHNHYTQKSLSLSPGGPPSGSSPMPYDLYH |
| | | | | WRVMAIQDFK | PSGGGAVNGTSQFTCFYNSRANISCVWSQD |
| | | | | PFENLRLMAPIS | GALQDTSCQVHAWPDRRRWNQTCELLPVSQ |
| | | | | LQVVHVETHRC | ASWACNLILGAPDSQKLTTVDIVTLRVLCRE |
| | | | | NISWEISQASHY | GVRWRVMAIQDFKPFENLRLMAPISLQVVH |
| | | | | FERHLEFEARTL | VETHRCNISWEISQASHYFERHLEFEARTL |
| | | | | SPGHTWEEAPL | SPGHTWEEAPLLTLKQKQEWICLETLTPDT |
| | | | | LTLKQKQEWICL | QYEFQVRVKPLQGEFTTWSPWSQPLAFRTK |
| | | | | ETLTPDTQYEFQ | PAALGKD (SEQ ID NO: 410) |
| | | | | VRVKPLQGEFTT | |
| | | | | WSPWSQPLAFR | |
| | | | | TKPAALGKD | |
| | | | | (SEQ ID NO: 4) | |
| AK511 | DNA604 | Knob: | | | ESKYGPPCPPCPAPEFLGGPSVFLFPPKPK |
| | | IgG4 | | | DTLMISRTPEVTCVVVDVSQEDPEVQFNWY |
| | | hFc- | | | VDGVEVHNAKTKPREEQFNSTYRVVSVLTV |
| | | hIL2(R38A, | | | LHQDWLNGKEYKCKVSNKGLPSSIEKTISK |
| | | F42A, Y45A, | | | AKGQPREPQVYTLPPCQEEMTKNQVSLWCL |
| | | E62A, C125A) | | | VKGFYPSDIAVEWESNGQPENNYKTTPPVL |
| | | | | | DSDGSFFLYSRLTVDKSRWQEGNVFSCSVM |
| | | | | | HEALHNHYTQKSLSLSLGGGSSPPGGGSSG |
| | | | | | GGSGPAPTSSSTKKTQLQLEHLLLDLQMIL |
| | | | | | NGINNYKNPKLTAMLTAKFAMPKKATELKH |
| | | | | | LQCLEEALKPLEEVLNLAQSKNFHLRPRDL |
| | | | | | ISNINVIVLELKGSETTFMCEYADETATIV |
| | | | | | EFLNRWITFAQSIISTLT |
| | | | | | (SEQ ID NO: 407) |
| AK511 | DNA621 | Hole: | GSGGG | AVNGTSQFTCF | ESKYGPPCPPCPAPEFLGGPSVFLFPPKPK |
| | | hFcIgG4- | (SEQ | YNSRANISCVW | DTLMISRTPEVTCVVVDVSQEDPEVQFNWY |
| | | [VPLSLY]- | ID | SQD6ALQDTSC | VDGVEVHNAKTKPREEQFNSTYRVVSVLTV |
| | | hCD122 | NO: | QVHAWPDRRR | LHQDWLNGKEYKCKVSNKGLPSSIEKTISK |
| | | | 31) | WNQTCELLPVS | AKGQPREPQVCTLPPSQEEMTKNQVSLSCA |
| | | | | QASWACNLILG | VKGFYPSDIAVEWESNGQPENNYKTTPPVL |
| | | | | APDSQKLTTVDI | DSDGSFFLYSRLTVDKSRWQEGNVFSCSVM |
| | | | | VTLRVLCREGVR | HEALHNHYTQKSLSLSLGGPPSGSSPGVPL |
| | | | | WRVMAIQDFK | SLYGSGGGAVNGTSQFTCFYNSRANISCVW |
| | | | | PFENLRLMAPIS | SQDGALQDTSCQVHAWPDRRRWNQTCELLP |
| | | | | LQVVHVETHRC | VSQASWACIMLILGAPDSQKLTTVDIVTLR |
| | | | | NISWEISQASHY | VLCREGVRVVRVMAIQDFKPFELMLRLMAP |
| | | | | FERHLEFEARTL | ISLQVVHVETHRCNISWEISQAS |
| | | | | SPGHTWEEAPL | HYFERHLEFEARTLSPGHTWEEAPLLTLKQ |
| | | | | LTLKQKQEWICL | KQEWICLETLTPDTQYEFQVRVKPLQGERT |
| | | | | ETLTPDTQYEFQ | WSPWSQPLAFRTKPAALGKD |
| | | | | VRVKPLQGEFTT | (SEQ ID NO: 414) |
| | | | | WSPWSQPLAFR | |
| | | | | TKPAALGKD | |
| | | | | (SEQ ID NO: 4) | |
| AK512 | DNA577 | Knob: | | | DKTHTCPPCPAPELLGGPSVFLFPPKPKDT |
| | | hFc(N297A, | | | LMASRTPEVTCVVVDVSHEDPEVKFNWYVD |
| | | I253A)- | | | GVEVHNAKTKPREEQYASTYRVVSVLTVLH |
| | | hIL2 | | | QDWLNGKEYKCKVSNKAIPAPIEKTISKAK |
| | | (R38A, | | | GQPREPQVYTLPPCRDELTKNQVSLWCLVK |
| | | F42A, | | | GFYPSDIAVEWESNGQPENNYKTTPPVLDS |
| | | Y45A, | | | DGSFFLYSKLTVDKSRWQQGNVFSCSVMHE |
| | | E62A, | | | ALHNHYTQKSLSLSPGGGSSPPGGGSSGGG |
| | | C125A) | | | SGPAPTSSSTKKTQLQLEHLLLDLQMILNG |
| | | | | | INNYKNPKLTAMLTAKFAMPKKATELKHLQ |
| | | | | | CLEEALKPLEEVLNIAQSKNFHLRPRDIIS |
| | | | | | NINVIVLELKGSETTFMCEYADETATIVEF |
| | | | | | LNRWITFAQSIISTLT |
| | | | | | (SEQ ID NO: 393) |
| AK512 | DNA625 | Hole: | | | DKTHTCPPCPAPELLGGPSVFLFPPKPKDTL |
| | | hFc(N297A, | | | MASRTPEVTCVVVDVSHEDPEVKFNWYVDG |
| | | I253A) | | | VEVHNAKTKPREEQYASTYRVVSVLTVLHQ |
| | | | | | PWLNGKEYKCKVSNKALPAPIEKTISKAKG |
| | | | | | QPREPQVCTLPPSRDELTKNQVSLSCAVKG |
| | | | | | FYPSDIAVEWESNGQPENNYKTTPPVLDSD |
| | | | | | GSFFLVSKLTVDKSRWQQGNVFSCSVMHEA |
| | | | | | LHNHYTQKSLSLSPG |
| | | | | | (SEQ ID NO: 10) |
| AK513 | DNA504 | Knob: Ig64 | | | ESKYGPPCPPCPAPEFLGGPSVFLFPPKPK |
| | | hFc- | | | DTLMISRTPEVTCVVVDVSQEDPEVQFNWY |
| | | hIL2(R38A, | | | VDGVEVHNAKTKPREEQFNSTYRVVSVLTV |
| | | F42A, Y45A, | | | LHQDWLNGKEYKCKVSNKGLPSSIEKTISK |
| | | E62A, C125A) | | | AKGQPREPQVYTLPPCQEEMTKNQVSLWCL |
| | | | | | VKGFYPSDIAVEWESNGQPENNYKTTPPVL |
| | | | | | DSDGSFFLYSRLTVDKSRWQEGNVFSCSVM |
| | | | | | HEALHNHYTQKSLSLSLGGGSSPPGGGSSG |
| | | | | | GGSGPAPTSSSTKKTQLQLEHLLLDLQMIL |
| | | | | | NGINNYKNPKLTAMLTAKFAMPKKATELKH |
| | | | | | LQCLEEALKPLEEVLNLAQSKNFHLRPRDL |
| | | | | | ISNINVIVLELKGSETTFMCEYADETATIV |
| | | | | | EFLNRWITFAQSIISTLT |
| | | | | | (SEQ ID NO: 407) |
| AK513 | DNA626 | Hole: | | | ESKYGPPCPPCPAPEFLGGPSVFLFPPKPK |
| | | HFcIgG4 | | | DTLMISRTPEVTCVVVDVSQEDPEVQFNWY |
| | | | | | VDGVEVHNAKTKPREEQFNSTYRVVSVLTV |
| | | | | | LHQDWLNGKEYKCKVSNKGLPSSIEKTISK |
| | | | | | AKGQPREPQVCTLPPSQEEMTKNQVSLSCA |
| | | | | | VKGFYPSDIAVEWESNGQPENNYKTTPPVL |
| | | | | | DSDGSFFLYSRLTVDKSRWQEGNVFSCSVM |
| | | | | | HEALHNHYTQKSLSLSLGPG |
| | | | | | (SEQ ID NO: 298) |
| AK526 | DNA670 | Knob: | | | DKTHTCPPCPAPELLGGPSVFLFPPKPKDT |
| | | hFc- | | | LMISRTPEVTCWVDVSHEDPEVKFNWYVDG |
| | | hIL2(R38A, | | | VEVHNAKTKPREEQYNSTYRWSVLTVLHQD |
| | | F42A, Y45A, | | | WLNGKEYKCKVSNKALPAPIEKTISKAKGQ |
| | | E62A, C125A) | | | PREPQWTLPPCRDELTKNQVSLWCLVKGFY |
| | | | | | PSDIAVEWESNGQPENNYKTTPPVLDSDGS |
| | | | | | FFLYSKLTVDKSRWQQGNVFSCSVMHEALH |
| | | | | | NHYTQKSLSLSPGGGSSPPGGGSSGGGSGP |
| | | | | | APTSSSTKKTQLQLEHLLLDLQMILNGINN |
| | | | | | YKNPKLTAMLTAKFAMPKKATELKHLQCLE |
| | | | | | EALKPLEEVLNLAQSKNFHLRPRDLISNIN |
| | | | | | VIVLELKGSETTFMCEYADETATIVEFLNR |
| | | | | | WITFAQSIISTLT |
| | | | | | (SEQ ID NO: 423) |
| AK526 | DNA672 | Hole: hFc- | GSGGG | AVNGTSQFTCF | DKTHTCPPCPAPELLGGPSVFIFPPKPKDTL |
| | | [VPLSLY]- | (SEQ | YNSRANISCVW | MISRTPEVTCVVVDVSHEDPEVKFNWYVDG |
| | | hCD122 | ID | SQD6ALQDTSC | VEVHNAKTKPREEQYNSTYRVVSVLTVLHQ |
| | | | NO: | QVHAWPDRRR | DWLNGKEYKCKVSNKALPAPIEKTISKAKG |
| | | | 31) | WNQTCELLPVS | QPREPQVCTLPPSRDELTKNQVSLSCAVKG |
| | | | | QASWACNLILG | FYPSDIAVEWESNGQPENNYKTTPPVLDSD |
| | | | | APDSQKLTTVDI | GSFFLVSKLTVDKSRWQQGNVFSCSVMHEA |
| | | | | VTLRVLCREGVR | LHNHYTQKSLSLSPGGPPSGSSPGVPLSLY |
| | | | | WRVMAIQDFK | GSGGGAVNGTSQFTCFYNSRANISCVWSQD |
| | | | | PFENLRLMAPIS | GALQDTSCQVHAWPDRRRWNQTCELLPVSQ |
| | | | | LQVVHVETHRC | ASWACNLILGAPDSQKLTTVDIVTIRVLCR |
| | | | | NISWEISQASHY | EGVRWRVMAIQDFKPFENLRLMAPISLQVV |
| | | | | FERHLEFEARTL | HVETHRCNISWEISQASHYFERHLEFEART |
| | | | | SPGHTWEEAPL | LSPGHTWEEAPLITIKQKQEWSCIETITPD |
| | | | | LTLKQKQEWICL | TQYEFQVRVKPLQGEFTTWSPWSQPLAFRT |
| | | | | ETLTPDTQYEFQ | KPAALGKD (SEQ ID NO: 425) |
| | | | | VRVKPLQGEFTT | |
| | | | | WSPWSQPLAFR | |
| | | | | TKPAALGKD | |
| | | | | (SEQ ID NO: 4) | |
| AK530 | DNA255 | Knob: | | | DKTHTCPPCPAPELLGGPSVFLFPPKPKDT |
| | | hFc(N297A)- | | | LMISRTPEVTCVVVDVSHEDPEVKFNWYVD |
| | | hIL2(R38A, | | | GVEVHNAKTKPREEQYASTYRVVSVLTVLH |
| | | F42A, Y45A, | | | QDWLNGKEYKCKVSNKALPAPIEKTISKAK |
| | | E62A; C125A) | | | GQPREPQVYTLPPCRDELTKNQVSLWCLVK |
| | | | | | GFYPSDIAVEWESMGQPENNYKTTPPVLDS |
| | | | | | DGSFFLYSKLTVDKSRWQQGNVFSCSVMHE |
| | | | | | ALHNHYTQKSLSLSPGGGSSPPGGGSSGGG |
| | | | | | SGPAPTSSSTKKTQLQLEHLLLDLQMILNG |
| | | | | | INNYKNPKLTAMLTAKFAMPKKATELKHLQ |
| | | | | | CLEEALKPLEEVLNLAQSKNFHLRPRDLISN |
| | | | | | INVIVLELKGSETTFMCEYADETATIVEFL |
| | | | | | NRWITFAQSIISTLT |
| | | | | | (SEQ ID NO: 51) |
| AK530 | DNA612 | Hole: | SGGG | AVNGTSQFTCF | DKTHTCPPCPAPELLGGPSVFLFPPKPKDTL |
| | | hFc(N297A)- | (SEQ ID | YNSRANISCVW | MISRTPEVTCVVVDVSHEDPEVKFNWYVDG |
| | | [MPYDLYHP]- | NO: 30) | SQDGALQDTSC | VEVHNAKTKPREEQYASTYRVVSVLTVLHQ |
| | | hCD122 | | QVHAWPDRRR | DWLNGKEYKCKVSNKALPAPIEKTISKAKG |
| | | (C122S, | | WNQTCELLPVS | QPREPQVCTLPPSRDELTKNQVSLSCAVKG |
| | | C168S) | | QASWACNLILG | FYPSQIAVEWESNGQPENNYKTTPPVLDSD |
| | | | | APDSQKLTTVDI | GSFFLVSKLTVDKSRWQQGNVFSCSVMHEA |
| | | | | VTLRVLCREGVR | LHNHYTQKSLSLSPGGPPSGSSPMPYDLYH |
| | | | | WRVMAIQDRC | PSGGGAVNGTSQFTCFYNSRANISCVWSQD |
| | | | | PFENLRLMAPIS | GALQDTSCQVHAWPDRRRWNQTCELLPVSQ |
| | | | | LQWHVETHRS | ASWACIMLILGAPDSQKLTTVDIVTLRVLC |
| | | | | NISWEISQASHY | REGVRWRVMAIQDFKPFENLRLMAPISLQV |
| | | | | FERHLEFEARTL | VHVETHRSNISWEISQASHYFERHLEFEAR |
| | | | | SPGHTWEEAPL | TISPGHTWEEAPLLTIKQKQEWISLETLTP |
| | | | | LTLKQKQEWISL | DTQYEFQVRVKPLQGEFTTWSPWSQPLAFR |
| | | | | ETLTPDTQYEFQ | TKPAALGKD (SEQ ID NO: 40) |
| | | | | VRVKPLQGEFTT | |
| | | | | WSPWSQPLAFR | |
| | | | | TKPAALGKD | |
| | | | | (SEQ ID NO: 5) | |
| AK531 | DNA255 | Knob: | | | DKTHTCPPCPAPELLGGPSVFLFPPKPKDT |
| | | hFc(N297A)- | | | LMISRTPEVTCVVVDVSHEDPEVKFNWYVD |
| | | hIL2(R38A, | | | GVEVHNAKTKPREEQYASTYRVVSVLTVLH |
| | | F42A, Y45A, | | | QDWLNGKEYKCKVSNKALPAPIEKTISKAK |
| | | E62A, C125A) | | | GQPREPQVYTLPPCRDELTKNQVSLWCLVK |
| | | | | | GFYPSDIAVEWESMGQPENNYKTTPPVLDS |
| | | | | | DGSFFLYSKLTVDKSRWQQGNVFSCSVMHE |
| | | | | | ALHNHYTQKSLSLSPGGGSSPPGGGSSGGG |
| | | | | | SGPAPTSSSTKKTQLQLEHLLLDLQMILNG |
| | | | | | INNYKNPKLTAMLTAKFAMPKKATELKHLQ |
| | | | | | CLEEALKPLEEVLNLAQSKNFHLRPRDLISN |
| | | | | | INVIVLELKGSETTFMCEYADETATIVEFL |
| | | | | | NRWITFAQSIISTLT |
| | | | | | (SEQ ID NO: 51) |
| AK531 | ANA614 | Hole: | SGGG | AVNGTSQFTCF | DKTHTCPPCPAPELLGGPSVFLFPPKPKDT |
| | | hFc(N297A)- | (SEQ ID | YNSRANISCVW | LMISRTPEVTCVVVDVSHEDPEVKFNWYVD |
| | | [DSGGMLT]- | NO: 30) | SQDGALQDTSC | GVEVHNAKTKPREEQYASTYRVVSVLTVLH |
| | | hCD122 | | QVHAWPDRRR | QDWLNGKEYKCKVSNKALPAPIEKTISKAK |
| | | (C122S, | | WNQTCELLPVS | GQPREPQVCTLPPSRDELTKNQVSLSCAVK |
| | | C168S) | | QASWACNLILG | GFYPSQIAVEWESNGQPENNYKTTPPVLDS |
| | | | | APDSQKLTTVDI | DGSFFLVSKLTVDKSRWQQGNVFSCSVMHE |
| | | | | VTLRVLCREGVR | ALHNHYTQKSLSLSPGGPPSGSSPGDSGGF |
| | | | | WRVMAIQDRC | MLTSGGGAVNGTSGFTCFYNSRANISCVWS |
| | | | | PFENLRLMAPIS | QDGALQDTSCQVHAWPDRRRWNQTCELLPV |
| | | | | LQWHVETHRS | SQASWACNLILGAPDSQKLTTVDIVTLRVL |
| | | | | NISWEISQASHY | CREGVRWRVMAIQDFKPFENLRLMAPISLQ |
| | | | | FERHLEFEARTL | VVHVETHRSNISWEISQASHYFERHLEFEA |
| | | | | SPGHTWEEAPL | RTLSPGHTWEEAPLLTLKQKQEWISLETIT |
| | | | | LTLKQKQEWISL | PDTQYEFQVRVKPLQGEFTTWSPWSQPLAF |
| | | | | ETLTPDTQYEFQ | RTKPAALGKD (SEQ ID NO: 413) |
| | | | | VRVKPLQGEFTT | |
| | | | | WSPWSQPLAFR | |
| | | | | TKPAALGKD | |
| | | | | (SEQ ID NO: 5) | |
| AK532 | DNA669 | Hole: | | | DKTHTCPPCPAPELLGGPSVFLFPPKPKDT |
| | | hFc- | | | LMISRTPEVTCVVVDVSHEDPEVKFNWYVD |
| | | hCD122 | | | GVEVHNAKTKPREEQYNSTYRVVSVLTVLH |
| | | | | | QDWINGKEYKCKVSNKALPAPIEKTISKAK |
| | | | | | GQPREPQVCTLPPSRDELTKNQVSLSCAVK |
| | | | | | GFYPSDIAVEWESNGQPENNYKTTPPVLDS |
| | | | | | DGSFFLVSKLTVDKSRWQQGNVFSCSVMHE |
| | | | | | ALHMHYTQKSLSLSPGPGSGSAVNGTSQFT |
| | | | | | CFYNSRANISCVWSQDGALQDTSCQVHAWP |
| | | | | | DRRRWNQTCELLPVSQASWACNLILGAPDS |
| | | | | | QKLTTVDIVTLRVLCREGVRWRVMAIQDFK |
| | | | | | PFENLRLMAPISLQWHVETHRCNISWEISQ |
| | | | | | ASHYFERHLEFEARTLSPGHTWEEAPLLTL |
| | | | | | KQKQEWICLETLTPDTQYEFQVRVKPLQGE |
| | | | | | FTTWSPWSQPLAFRTKPAALGKD |
| | | | | | (SEQ ID NO: 422) |
| AK532 | DNA561 | Knob: | SGGG | APTSSSTKKTQL | DKTHTCPPCPAPELLGGPSVFLFPPKPKDT |
| | | hFc | (SEQ | QLEHLLLDLQMI | IMISRTPEVTCVVVDVSHEDPEVKFNWYV |
| | | [VPLSLY]- | ID | LNGiNNYKNPKL | DGVEVHNAKTKPREEQYNSTYRVVSV |
| | | hIL2(R38A, | NO: | TAMLTAKFAMP | LTVLHQDWLNGKEYKCKVSNKALPAPIEKT |
| | | F42A, Y45A, | 30) | KKATELKHLQCL | ISKAKGQPREPQVYTLPPCRDELTKNQVSL |
| | | E62A, C125A) | | EEALKPLEEVLN | WCLVKGFYPSDIAVEWESNGQPENNYKTTP |
| | | | | LAQSKNFHLRPR | PVLCSDGSFFLYSKLTVDKSRWQQGNVFSC |
| | | | | DLISNINVIVLEL | SVMHEALHNHYTQKSLSLSPGSSPGVPLSL |
| | | | | KGSETTFMCEY | YSGPAPTSSSTKKTQLQLEHLLLDLQMILN |
| | | | | ADETATIVEFLN | GINNYKNPKLTAMLTAKFAMPKKATELKHL |
| | | | | RWITFAQSIISTL | QCIEEALKPLEEVLNLAQSKNFHIRPRDLI |
| | | | | T | SNINVIVLELKGSETTFMCEYADETATIVE |
| | | | | (SEQ ID | FLNRWITFAQSRSTLT |
| | | | | NO: 3) | (SEQ ID NO: 424) |

| | | component1 | Component2 | Component3 |
|---|---|---|---|---|
| name | newnames | Sequence | Sequence | Sequence |
| DNA158 | Hole: | DKTHTCPPCPAPELLGGPSVFLFPPKPKDTL | PGSGS | |
| | hFc(N297A) | MISRTPEVTCVVVDVSHEDPEVKFNWYVDGV | (SEQ | |
| | | EVHNAKTKPREEQYASTYRVVSVLTVLHQDW | ID | |
| | | LNGKEYKCKVSNKALPAPIEKTISKAKGQPR | NO: | |
| | | EPQVCTLPPSRDELTKNQVSLSCAVKGFYPS | 14) | |
| | | DIAVEWESNGQPENNYKTTPPVLDSDGSFFL | | |
| | | VSKLTVDKSRWQQGMVFSCSVMHEALHNHY | | |
| | | TQKSLSLSPG | | |
| | | (SEQ ID NO: 9) | | |
| DNA187 | Hole: | DKTHTCPPCPAPELLGGPSVFLFPPKPKDTL | | AVNGTSQFTCFYNSRANISCVWSQDGALQDT |
| | hFc(N297A) | MISRTPEVTCVVVDVSHEDPEVKFNWYVDGV | | SCQVHAWPDRRRWNQTCELLPVSQASWACN |
| | | EVHNAKTKPREEQYASTYRVVSVLTVLHQDW | | LILGAPDSQKLTTVDIVTLRVLCREGVRWR |
| | | LNGKEYKCKVSNKALPAPIEKTISKAKGQPR | | VMAIQDFKPFENLRLMAPISLQVVHVETHR |
| | | EPQVCTLPPSRDELTKNQVSLSCAVKGFYPS | | CNISWEISQASHYFERHLEFEARTLSPGHT |
| | | DIAVEWESNGQPENNYKTTPPVLDSDGSFFL | | WEEAPLLTLKQKQEWICLETLTPDTQYEFQ |
| | | VSKLTVDKSRWQQGMVFSCSVMHEALHNHY | | VRVKPLQGEFTTWSPWSQPLAFRTKPAALG |
| | | TQKSLSLSPG | | KD (SEQ ID NO: 4) |
| | | (SEQ ID NO: 9) | | |
| DNA255 | Knob: | DKTHTCPPCPAPELLGGPSVFLFPPK | GGSSPP | APTSSSTKKTQL |
| | hFc(N297A)- | PKDTLMISRTPEVTCVVVDVSHEDP | GGGSSG | QLEHLLLDLQMILNGINNYKNPKL |
| | hIL2(R38A, | EVKFNWYVDGVEVHNAKTKPREEQY | GGSGP | TAMLTAKFAMPKKATELKHLQCL |
| | F42A, | ASTYRVVSVLTVLHQDWLNGKEYKC | (SEQ ID | EEALKPLEEVLNLAQSKNFHLRPR |
| | Y45A, | KVSNKALPAPIEKTISKAKGQPREP | NO: 23) | DLISNINVIVLELKGSETTFMCEY |
| | E62A, | QVYTLPPCRDELTKNQVSLWCLVKG | | ADETATIVEFLNRWITFAQSIISTLT |
| | C125A) | FYPSDSAVEWESNGQPENNYKTTPP | | (SEQ ID NO: 3) |
| | | VIDSDGSFFLYSKITVDKSRWQQGN | | |
| | | VFSCSVMHEALHNHYTQKSLSLSPG | | |
| | | (SEQ ID NO: 12) | | |
| DNA263 | Knob: | DKTHTCPPCPAPELLGGPSVFLFPPK | GSPG | VPLSLY |
| | hFc(N297A)- | PKDTLMISRTPEVTCVVVDVSHEDP | (SEQ ID | (SEQ ID |
| | [VPLSLY]- | EVKFNWYVDGVEVHNAKTKPREEQY | NO: 34) | NO: 28) |
| | hIL2(R38A, | ASTYRVVSVLTVLHQDWLNGKEYKC | | |
| | F42A, | KVSNKALPAPIEKTISKAKGQPREP | | |
| | Y45A, | QVYTLPPCRDELTKNQVSLWCLVKG | | |
| | E62A, | FYPSDSAVEWESNGQPENNYKTTPP | | |
| | C125A) | VIDSDGSFFLYSKITVDKSRWQQGN | | |
| | | VFSCSVMHEALHNHYTQKSLSLSPG | | |
| | | (SEQ ID NO: 12) | | |
| DNA278 | Knob: | DKTHTCPPCPAPELLGGPSVFLFPPK | GSGP | DSGGFMLT |
| | hFc(N297A)- | PKDTLMISRTPEVTCVVVDVSHEDP | (SEQ ID | (SEQ ID |
| | [DSGGFMLT] | EVKFNWYVDGVEVHNAKTKPREEQY | NO: 33) | NO: 25) |
| | hIL2 | ASTYRVVSVLTVLHQDWLNGKEYKC | | |
| | (C125A) | KVSNKALPAPIEKTISKAKGQPREP | | |
| | | QVYTLPPCRDELTKNQVSLWCLVKG | | |
| | | FYPSDSAVEWESNGQPENNYKTTPP | | |
| | | VIDSDGSFFLYSKITVDKSRWQQGN | | |
| | | VFSCSVMHEALHNHYTQKSLSLSPG | | |
| | | (SEQ ID NO: 12) | | |
| DNA281 | Knob: | DKTHTCPPCPAPELLGGPSVFLFPPK | GSGP | DSGGFMLT |
| | hFc(N297A)- | PKDTLMISRTPEVTCVVVDVSHEDP | (SEQ ID | (SEQ ID |
| | [DSGGFMLT] | EVKFNWYVDGVEVHNAKTKPREEQY | NO: 33) | NO: 25) |
| | hIL2 | ASTYRVVSVLTVLHQDWLNGKEYKC | | |
| | (R38A, | KVSNKALPAPIEKTISKAKGQPREP | | |
| | F42A, | QVYTLPPCRDELTKNQVSLWCLVKG | | |
| | Y45A, | FYPSDSAVEWESNGQPENNYKTTPP | | |
| | E62A, | VIDSDGSFFLYSKITVDKSRWQQGN | | |
| | C125A) | VFSCSVMHEALHNHYTQKSLSLSPG | | |
| | | (SEQ ID NO: 12) | | |
| DNA440 | Hole: | DKTHTCPPCPAPELLGGPSVFLFPPKPKDTL | PGSGS | AVNGTSQFTCFYNSRANISCVW |
| | hFc(N297A)- | MISRTPEVTCVVVDVSHEDPEVKFNWYVDGV | (SEQ | SQDGALQDTSCQVHAWPDRRR |
| | hCD122 | EVHNAKTKPREEQYASTYRVVSVLTVLHQDW | ID | WNQTCELLPVSQASWACNLILG |
| | (C122S, | LNGKEYKCKVSNKALPAPIEKTISKAKGQPR | NO: | APDSQKLTTVDIVTLRVLCREGVR |
| | C168S) | EPQVCTLPPSRDELTKNQVSLSCAVKGFYPS | 14) | WRVMAIQDRCPFENLRLMAPIS |
| | | DIAVEWESNGQPENNYKTTPPVLDSDGSFFL | | LQWHVETHRSNISWEISQASHY |
| | | VSKLTVDKSRWQQGMVFSCSVMHEALHNHY | | FERHLEFEARTLSPGHTWEEAPL |
| | | TQKSLSLSPG | | LTLKQKQEWISLETLTPDTQYEFQ |
| | | (SEQ ID NO: 9) | | VRVKPLQGEFTTWSPWSQPLAFR |
| | | | | TKPAALGKD |
| | | | | (SEQ ID NO: 5) |
| DNA476 | Knob: | DKTHTCPPCPAPELLGGPSVFLFPPK | G | NPMGSDPVNFKLLRWNG |
| | hFc(N297A)- | PKDTLMISRTPEVTCVVVDVSHEDP | | (SEQ ID NO: 325) |
| | [NPMGSD | EVKFNWYVDGVEVHNAKTKPREEQY | | |
| | PVNFK | ASTYRVVSVLTVLHQDWLNGKEYKC | | |
| | LLRWNG]- | KVSNKALPAPIEKTISKAKGQPREP | | |
| | hIL2(F42S, | QVYTLPPCRDELTKNQVSLWCLVKG | | |
| | E62S, | FYPSDSAVEWESNGQPENNYKTTPP | | |
| | C125A) | VIDSDGSFFLYSKITVDKSRWQQGN | | |
| | | VFSCSVMHEALHNHYTQKSLSLSPG | | |
| | | (SEQ ID NO: 12) | | |
| DNA477 | Knob: | TIKPCPPCKCPAPNAAGGPSVFIFP | GGSSPP | APTSSSTKKTQL |
| | mFcIgG2a | PKIKDVLMISLSPIVTCVVVDVSED | GGGSSG | QLEHLLLDLQMILNGINNYKNPKL |
| | (LALAPG)- | DPDVQISWFVNNVEVHTAQTQTHRE | GGSGP | TAMLTAKFAMPKKATELKHLQCL |
| | hIL2 | DYNSTLRVVSALPIQHQDWMSGKEF | (SEQ ID | EEALKPLEEVLNLAQSKNFHLRPR |
| | (R38A, | KCKVNNKDLGAPIERTISKPKGSVR | NO: 23) | DLISNINVIVLELKGSETTFMCEY |
| | F42A, | APQVYVLPPCEEEMTKKQVTLWCMV | | ADETATIVEFLNRWITFAQSIISTLT |
| | Y45A, | TQFMPEDIYVEWTNNGKTELNYKNT | | (SEQ ID NO: 3) |
| | E62A, | EPVLDSQGSYFMYSKLRVEKKNWVE | | |
| | C125A) | RNSYSCSWHEGLHNHHTTKSFSRTP | | |
| | | G (SEQ ID NO: 280) | | |
| DNA478 | Knob: | TIKPCPPCKCPAPNAAGGPSVFIFP | GSGP | DSGGFMLT |
| | mFcIgG2a | PKIKDVLMISLSPIVTCVVVDVSED | (SEQ ID | (SEQ ID |
| | (LALAPG)- | DPDVQISWFVNNVEVHTAQTQTHRE | NO: 33) | NO: 25) |
| | [VPLSLY] | DYNSTLRVVSALPIQHQDWMSGKEF | | |
| | hIL2 | KCKVNNKDLGAPIERTISKPKGSVR | | |
| | (R38A, | APQVYVLPPCEEEMTKKQVTLWCMV | | |
| | F42A, | TQFMPEDIYVEWTNNGKTELNYKNT | | |
| | Y45A, | EPVLDSQGSYFMYSKLRVEKKNWVE | | |
| | E62A, | RNSYSCSWHEGLHNHHTTKSFSRTP | | |
| | C125A) | G (SEQ ID NO: 280) | | |
| DNA479 | Hole: | TIKPCPPCKCPAPNAAGGPSVFIFP | | |
| | mFcIgG2a | PKIKDVLMISLSPIVTCVVVDVSED | | |
| | (LALAPG) | DPDVQISWFVNNVEVHTAQTQTHRE | | |
| | | DYNSTLRVVSALPIQHQDWMSGKEF | | |
| | | KCKVNNKDLGAPIERTISKPKGSVR | | |
| | | APQVCVLPPPEEEMTKKQVTLSCAV | | |
| | | TDFMPEDIWEWTNNGKTELNYKNTE | | |
| | | PVLDSDGSYFMVSKLRVEKKNWVER | | |
| | | NSYSCSWHEGLHNHHTTKSFSRTPG | | |
| | | (SEQ ID NO: 281) | | |
| DNA480 | Hole: | TIKPCPPCKCPAPNAAGGPSVFIFP | PGSGS | AVNGTSQFTCFYNSRANISCVWSQDGALQDT |
| | mFcIgG2a | PKIKDVLMISLSPIVTCVVVDVSED | (SEQ | SCQVHAWPDRRRWNQTCELLPVSQASWACN |
| | (LALAPG)- | DPDVQISWFVNNVEVHTAQTQTHRE | ID | LILGAPDSQKLTTVDIVTLRVLCREGVRWR |
| | hCD122 | DYNSTLRVVSALPIQHQDWMSGKEF | NO: | VMAIQDFKPFENLRLMAPISLQVVHVETHR |
| | | KCKVNNKDLGAPIERTISKPKGSVR | 14) | CNISWEISQASHYFERHLEFEARTLSPGHT |
| | | APQVCVLPPPEEEMTKKQVTLSCAV | | WEEAPLLTLKQKQEWICLETLTPDTQYEFQ |
| | | TDFMPEDIWEWTNNGKTELNYKNTE | | VRVKPLQGEFTTWSPWSQPLAFRTKPAALG |
| | | PVLDSDGSYFMVSKLRVEKKNWVER | | KD (SEQ ID NO: 4) |
| | | NSYSCSWHEGLHNHHTTKSFSRTPG | | |
| | | (SEQ ID NO: 281) | | |
| DNA516 | FSSc | EVQLLESGGGLVQPGGSLRLSCAASG | GGS | DKTHTCPPCPAPELLGGPSVFLFPPKPKDTL |
| | FvVersion1- | FTFSLFTMSWVRQAPGKGLEVVVSA | | MISRTPEVTCVVVDVSHEDPEVKFNWYVDGV |
| | Hole: | ISGSGGSTYYADSVKGRFTISRDNS | | EVHNAKTKPREEQYASTYRVVSVLTVLHQDW |
| | hFc(N297A)- | KNTLYLQMNSLRAEDTAVYYCAKST | | LNGKEYKCKVSNKALPAPIEKTISKAKGQPR |
| | hCD122 | HLYLFDYWGQGTLVTVSSGGGGSGG | | EPQVCTLPPSRDELTKNQVSLSCAVKGFYPS |
| | | GGSGGGGSEIVLTQSPGTLSLSPGE | | DIAVEWESNGQPENNYKTTPPVLDSDGSFFL |
| | | RATLSCRASQSVSMPFLAWYQQKPG | | VSKLTVDKSRWQQGMVFSCSVMHEALHNHY |
| | | QAPRLLIYGASSRATGIPDRFSGSG | | TQKSLSLSPG |
| | | SGTDFTLTISRLEPEDFAVYYCQQM | | (SEQ ID NO: 9) |
| | | RGRPPTFGQGTKVEIK | | |
| | | (SEQ ID NO: 282) | | |
| DNA520 | Hole: | TIKPCPPCKCPAPNAAGGPSVFIFP | HHHHHHHH | |
| | mFcIgG2a | PKIKDVLMISLSPIVTCVVVDVSED | (SEQ | |
| | (LALAPG)- | DPDVQISWFVNNVEVHTAQTQTHRE | ID | |
| | NoAnnotation | DYNSTLRVVSALPIQHQDWMSGKEF | NO: | |
| | Found | KCKVNNKDLGAPIERTISKPKGSVR | 308) | |
| | | APQVCVLPPPEEEMTKKQVTLSCAV | | |
| | | TDFMPEDIWEWTNNGKTELNYKNTE | | |
| | | PVLDSDGSYFMVSKLRVEKKNWVER | | |
| | | NSYSCSWHEGLHNHHTTKSFSRTPG | | |
| | | (SEQ ID NO: 281) | | |
| DNA521 | Hole: | TIKPCPPCKCPAPNAAGGPSVFIFP | PGSGS | AVNGTSQFTCFYNSRANISCVWSQDGALQDT |
| | mFcIgG2a | PKIKDVLMISLSPIVTCVVVDVSED | (SEQ | SCQVHAWPDRRRWNQTCELLPVSQASWACN |
| | (LALAPG)- | DPDVQISWFVNNVEVHTAQTQTHRE | ID | LILGAPDSQKLTTVDIVTLRVLCREGVRWR |
| | hCD122- | DYNSTLRVVSALPIQHQDWMSGKEF | NO: | VMAIQDFKPFENLRLMAPISLQVVHVETHR |
| | NoAnnotation | KCKVNNKDLGAPIERTISKPKGSVR | 14) | CNISWEISQASHYFERHLEFEARTLSPGHT |
| | Found | APQVCVLPPPEEEMTKKQVTLSCAV | | WEEAPLLTLKQKQEWICLETLTPDTQYEFQ |
| | | TDFMPEDIWEWTNNGKTELNYKNTE | | VRVKPLQGEFTTWSPWSQPLAFRTKPAALG |
| | | PVLDSDGSYFMVSKLRVEKKNWVER | | KD (SEQ ID NO: 4) |
| | | NSYSCSWHEGLHNHHTTKSFSRTPG | | |
| | | (SEQ ID NO: 281) | | |
| DNA522 | Hole: | TIKPCPPCKCPAPNAAGGPSVFIFP | PGSGS | AVKNCSHLECFYNSRANVSCMWSHEEALNV |
| | mFcIgG2a | PKIKDVLMISLSPIVTCVVVDVSED | (SEQ | TTCHVHAKSNLRHWNKTCELTLVRQASWAC |
| | (LALAPG)- | DPDVQISWFVNNVEVHTAQTQTHRE | ID | NLILGSFPESQSLTSVDLLDINWCWEEKGWR |
| | mCD122- | DYNSTLRVVSALPIQHQDWMSGKEF | NO: | RVKTCDFHPFDNLRLVAPHSLQVLHIDTQR |
| | NoAnnotation | KCKVNNKDLGAPIERTISKPKGSVR | 14) | CNISWKVSQVSHYIEPYLEFEARRRLLGHS |
| | Found | APQVCVLPPPEEEMTKKQVTLSCAV | | WEDASVLSLKQRQQWLFLEMLIPSTSYEVQ |
| | | TDFMPEDIWEWTNNGKTELNYKNTE | | VRVKAQRNNTGTWSPWSQPLTFRTRPADPM |
| | | PVLDSDGSYFMVSKLRVEKKNWVER | | KE |
| | | NSYSCSWHEGLHNHHTTKSFSRTPG | | (SEQ ID NO: 326) |
| | | (SEQ ID NO: 281) | | |
| DNA528 | Hole: | DKTHTCPPCPAPELLGGPSVFLFPPKPKDTL | PGSGS | AVNGTSQFTCFYNSRANISCVWSQOGALQD |
| | hFc(N297A)- | MISRTPEVTCVVVDVSHEDPEVKFNWYVDGV | (SEQ | TSCQVHAWPDRRRWNGTCELLPVSQASWAC |
| | hCD122 | EVHNAKTKPREEQYASTYRVVSVLTVLHQDW | ID | NLILGAPDSQKLTTVDIVTLRVLCREGVRWR |
| | (C168S) | LNGKEYKCKVSNKALPAPIEKTISKAKGQPR | NO: | VMAIGDFKPFENLRIMAPISLQVVHVETHR |
| | | EPQVCTLPPSRDELTKNQVSLSCAVKGFYPS | 14) | CNISWEISQASHYFERHLEFEARTLSPGHT |
| | | DIAVEWESNGQPENNYKTTPPVLDSDGSFFL | | WEEAPLLTLKQKQEWISLETLTPDTQYEFQ |
| | | VSKLTVDKSRWQQGMVFSCSVMHEALHNHY | | yRVKPLQGEFTTWSPWSQPLAFRTKPAALGK |
| | | TQKSLSLSPG | | D (SEQ ID NO: 327) |
| | | (SEQ ID NO: 9) | | |
| DNA530 | Knob: | VRSGCKPCICTVPEVSSVFIFPPKP | GGSSPP | APTSSSTKKTQL |
| | mFcIgG1 | KDVLTITLTPKVTCVVVAISKDDPE | GGGSSG | QLEHLLLDLQMILNGINNYKNPKL |
| | (DAPG)- | VQFSWFVDDVEVHTAQTQPSEEQFN | GGSGP | TAMLTAKFAMPKKATELKHLQCL |
| | hIL2 | STFRSVSELPIMHQDWLNGKEFKCR | (SEQ ID | EEALKPLEEVLNLAQSKNFHLRPR |
| | (R38A, | VNSAAFGAPIEKTISKTKGRPKAPQ | NO: 23) | DLISNINVIVLELKGSETTFMCEY |
| | F42A, | VYTIPPPKEQMAKDKVSLTCMITDF | | ADETATIVEFLNRWITFAQSIISTLT |
| | Y45A, | FPEDITVEWQWNGQPAENYDNTQPI | | (SEQ ID NO: 3) |
| | E62A, | MOTDGSYFVYSDLNVQKSNWEAGNT | | |
| | C125A) | FTCSVLHEGIHNHHTEKSLSHSPG | | |
| | | (SEQ ID NO: 283) | | |
| DNA531 | Knob: | VRSGCKPCICTVPEVSSVFIFPPKP | GSPG | VPLSLY |
| | mFcIgG1 | KDVLTITLTPKVTCVVVAISKDDPE | (SEQ | (SEQ |
| | (DAPG)- | VQFSWFVDDVEVHTAQTQPSEEQFN | ID | ID |
| | [VPLSLY] | STFRSVSELPIMHQDWLNGKEFKCR | NO: | NO: |
| | hIL2 | VNSAAFGAPIEKTISKTKGRPKAPQ | 34) | 28) |
| | (R38A, | VYTIPPPKEQMAKDKVSLTCMITDF | | |
| | F42A, | FPEDITVEWQWNGQPAENYDNTQPI | | |
| | Y45A, | MOTDGSYFVYSDLNVQKSNWEAGNT | | |
| | E62A, | FTCSVLHEGIHNHHTEKSLSHSPG | | |
| | C125A) | (SEQ ID NO: 283) | | |
| DNA532 | Hole: | VRSGCKPCICTVPEVSSVFIFPPKP | | |
| | mFcIgG1 | KDVLTSTLTPKVTCVVVAISKDDPE | | |
| | (DAPG) | VQFSWFVDDVEVHTAQTQPREEQFN | | |
| | | STFRSVSELPIMHQDWINGKEFKCR | | |
| | | VNSAAFGAPIEKTISKTKGRPKAPQ | | |
| | | VYTIPPPKKQMAKDKVSLTCMITDF | | |
| | | FPEDITVEWQWNGQPAENYKNTQPI | | |
| | | MKTDGSYFVYSKLNVQKSNWEAGNT | | |
| | | FTCSVLHEGLHNHHTEKSLSHSPG | | |
| | | (SEQ ID NO: 284) | | |
| DNA533 | Hole: | VRSGCKPCICTVPEVSSVFIFPPKP | PGSGS | AVNGTSQFTCFYNSRANISCVWSQDGALQDT |
| | mFcIgG1 | KDVLTSTLTPKVTCVVVAISKDDPE | (SEQ | SCQVHAWPDRRRWNQTCELLPVSQASWACN |
| | (DAPG)- | VQFSWFVDDVEVHTAQTQPREEQFN | ID | LILGAPDSQKLTTVDIVTLRVLCREGVRWR |
| | hCD122 | STFRSVSELPIMHQDWINGKEFKCR | NO: | VMAIQDFKPFENLRLMAPISLQVVHVETHR |
| | | VNSAAFGAPIEKTISKTKGRPKAPQ | 14) | CNISWEISQASHYFERHLEFEARTLSPGHT |
| | | VYTIPPPKKQMAKDKVSLTCMITDF | | WEEAPLLTLKQKQEWICLETLTPDTQYEFQ |
| | | FPEDITVEWQWNGQPAENYKNTQPI | | VRVKPLQGEFTTWSPWSQPLAFRTKPAALG |
| | | MKTDGSYFVYSKLNVQKSNWEAGNT | | KD (SEQ ID NO: 4) |
| | | FTCSVLHEGLHNHHTEKSLSHSPG | | |
| | | (SEQ ID NO: 284) | | |
| DNA534 | Hole: | VRSGCKPCICTVPEVSSVFIFPPKP | | AVKNCSHLECFYNSRANVSCMWSHEEALNV |
| | mFcIgG1 | KDVLTSTLTPKVTCVVVAISKDDPE | | TTCHVHAKSNLRHWNKTCELTLVRQASWAC |
| | (DAPG)- | VQFSWFVDDVEVHTAQTQPREEQFN | | NLILGSFPESQSLTSVDLLDINWCWEEKGWR |
| | mCD122 | STFRSVSELPIMHQDWINGKEFKCR | | RVKTCDFHPFDNLRLVAPHSLQVLHIDTQR |
| | | VNSAAFGAPIEKTISKTKGRPKAPQ | | CNISWKVSQVSHYIEPYLEFEARRRLLGHS |
| | | VYTIPPPKKQMAKDKVSLTCMITDF | | WEDASVLSLKQRQQWLFLEMLIPSTSYEVQ |
| | | FPEDITVEWQWNGQPAENYKNTQPI | | VRVKAQRNNTGTWSPWSQPLTFRTRPADPM |
| | | MKTDGSYFVYSKLNVQKSNWEAGNT | | KE |
| | | FTCSVLHEGLHNHHTEKSLSHSPG | | (SEQ ID NO: 326) |
| | | (SEQ ID NO: 284) | | |
| DNA542 | Knob: | DKTHTCPPCPAPELLGGPSVFLFPPK | | APTSSSTKKTQL |
| | hFc(N297A)- | PKDTLMISRTPEVTCVVVDVSHEDP | | QLEHLLLDLQMILNGINNYKNPKL |
| | hIL2(R38A, | EVKFNWYVDGVEVHNAKTKPREEQY | | TAMLTAKFAMPKKATELKHLQCL |
| | F42A, | ASTYRVVSVLTVLHQDWLNGKEYKC | | EEALKPLEEVLNLAQSKNFHLRPR |
| | Y45A, | KVSNKALPAPIEKTISKAKGQPREP | | DLISNINVIVLELKGSETTFMCEY |
| | E62A, | QVYTLPPCRDELTKNQVSLWCLVKG | | ADETATIVEFLNRWITFAQSIISTLT |
| | C125A) | FYPSDSAVEWESNGQPENNYKTTPP | | (SEQ ID NO: 3) |
| | | VIDSDGSFFLYSKITVDKSRWQQGN | | |
| | | VFSCSVMHEALHNHYTQKSLSLSPG | | |
| | | (SEQ ID NO: 12) | | |
| DNA543 | Hole: | DKTHTCPPCPAPELLGGPSVFLFPPKPKDTL | GPPSG | VPLSLY |
| | hFc(N297A)- | MISRTPEVTCVVVDVSHEDPEVKFNWYVDGV | SSPG | (SEQ |
| | [VPLSLY] | EVHNAKTKPREEQYASTYRVVSVLTVLHQDW | (SEQ | ID |
| | hCD122 | LNGKEYKCKVSNKALPAPIEKTISKAKGQPR | ID | NO: |
| | | EPQVCTLPPSRDELTKNQVSLSCAVKGFYPS | NO: | 28) |
| | | DIAVEWESNGQPENNYKTTPPVLDSDGSFFL | 36) | |
| | | VSKLTVDKSRWQQGMVFSCSVMHEALHNHY | | |
| | | TQKSLSLSPG | | |
| | | (SEQ ID NO: 9) | | |
| DNA544 | Knob: | DKTHTCPPCPAPELLGGPSVFLFPPK | GSPG | VPLSLY |
| | hFc(N297A)- | PKDTLMISRTPEVTCVVVDVSHEDP | (SEQ | (SEQ |
| | [VPLSLY]- | EVKFNWYVDGVEVHNAKTKPREEQY | ID | ID |
| | hIL2(R38A, | ASTYRVVSVLTVLHQDWLNGKEYKC | NO: | NO: |
| | F42A, | KVSNKALPAPIEKTISKAKGQPREP | 34) | 28) |
| | Y4SA, E62A, | QVYTLPPCRDELTKNQVSLWCLVKG | | |
| | L30F, R81D, | FYPSDSAVEWESNGQPENNYKTTPP | | |
| | L85V, 186V, | VIDSDGSFFLYSKITVDKSRWQQGN | | |
| | I92F, | VFSCSVMHEALHNHYTQKSLSLSPG | | |
| | C125A) | (SEQ ID NO: 12) | | |
| DNA545 | Knob: | DKTHTCPPCPAPELLGGPSVFLFPPK | GISSGLL | APTSSSTKKTQL |
| | hFc(N297A)- | PKDTLMISRTPEVTCVVVDVSHEDP | SGRSSGP | QLEHLLLDLQMILNGINNYKNPKL |
| | hIL2(R38A, | EVKFNWYVDGVEVHNAKTKPREEQY | (SEQ ID | TAMLTAKFAMPKKATELKHLQCL |
| | F42A, | ASTYRVVSVLTVLHQDWLNGKEYKC | NO: 311) | EEALKPLEEVLNLAQSKNFHLRPR |
| | Y45A, | KVSNKALPAPIEKTISKAKGQPREP | | DLISNINVIVLELKGSETTFMCEY |
| | F62A, | QVYTLPPCRDELTKNQVSLWCLVKG | | ADETATIVEFLNRWITFAQSIISTLT |
| | C125A) | FYPSDSAVEWESNGQPENNYKTTPP | | (SEQ ID NO: 3) |
| | | VIDSDGSFFLYSKITVDKSRWQQGN | | |
| | | VFSCSVMHEALHNHYTQKSLSLSPG | | |
| | | (SEQ ID NO: 12) | | |
| DNA546 | Knob: | DKTHTCPPCPAPELLGGPSVFLFPPK | GGSSPP | APTSSSTKKTQLQIEHLLLDLQMIINGINNY |
| | hFc(N297A)- | PKDTLMISRTPEVTCVVVDVSHEDP | GGGSSG | KNPKLTAMLTAKFAMPKKATELKHLQCLEE |
| | hIL2(R38A, | EVKFNWYVDGVEVHNAKTKPREEQY | GGSGP | ALKPLEEVLNLAQSKNFHFDPRDVVSNINV |
| | F42A, | ASTYRVVSVLTVLHQDWLNGKEYKC | (SEQ ID | FVLELKGSETTFMCEYADETATIVEFLNRW |
| | Y45A, E62A, | KVSNKALPAPIEKTISKAKGQPREP | NO: 23) | ITFAQSIISTLT (SEQ ID NO: 328) |
| | L80F, R81D, | QVYTLPPCRDELTKNQVSLWCLVKG | | |
| | L85V, 186V, | FYPSDSAVEWESNGQPENNYKTTPP | | |
| | 192F | VIDSDGSFFLYSKITVDKSRWQQGN | | |
| | C125A) | VFSCSVMHEALHNHYTQKSLSLSPG | | |
| | | (SEQ ID NO: 12) | | |
| DNA547 | Hole: | EPKSSDKTHTCPPCPAPELLGGPSV | DKTHTCPPCPAPELLGGPSVFLFPPKPKDTL | PGSGS |
| | hFcIgG1 | FLFPPKPKDTLMISRTPEVTCVVVD | MISRTPEVTCVVVDVSHEDPEVKFNWYVDGV | (SEQ |
| | (N297A | VSHEDPEVKFNWYVQGVEVHNAKTK | EVHNAKTKPREEQYASTYRVVSVLTVLHQDW | ID |
| | + EPKSS)- | PREEQYASTYRVVSVLTVLHQDWLN | LNGKEYKCKVSNKALPAPIEKTISKAKGQPR | NO: |
| | Hole: | GKEYKCKVSNKALPAPIEKTISKAK | EPQVCTLPPSRDELTKNQVSLSCAVKGFYPS | 14) |
| | hFc(N297A)- | GQPREPQVCTLPPSRDELTKNQVSL | DIAVEWESNGQPENNYKTTPPVLDSDGSFFL | |
| | hCD122 | SCAVKGFYPSDIAVEWESNGQPENN | VSKLTVDKSRWQQGMVFSCSVMHEALHNHY | |
| | | YKTTPPVLDSDGSFFLVSKLTVDKS | TQKSLSLSPG | |
| | | RWQQGNVFSCSVMHEALHNHYTQKS | (SEQ ID NO: 9) | |
| | | LSLSPG | | |
| | | (SEQ ID NO: 285) | | |
| DNA548 | Hole: | AKTDKTHTCPPCPAPELLGGPSVFL | DKTHTCPPCPAPELLGGPSVFLFPPKPKDTL | PGSGS |
| | hFcIgG1 | FPPKPKDTLMISRTPEVTCVVVDVS | MISRTPEVTCVVVDVSHEDPEVKFNWYVDGV | (SEQ |
| | (N297A | HEDPEVKFNWYVDGVEVHNAKTKPR | EVHNAKTKPREEQYASTYRVVSVLTVLHQDW | ID |
| | + AKT)- | EEQYASTYRWSVLTVLHQDWLNGKE | LNGKEYKCKVSNKALPAPIEKTISKAKGQPR | NO: |
| | Hole: | YKCKVSNKALPAPIEKTISKAKGQP | EPQVCTLPPSRDELTKNQVSLSCAVKGFYPS | 14) |
| | hFc(N297A)- | REPQVCTLPPSRDELTKNQVSLSCA | DIAVEWESNGQPENNYKTTPPVLDSDGSFFL | |
| | hCD122 | VKGFYPSDIAVEWESNGQPENNYKT | VSKLTVDKSRWQQGMVFSCSVMHEALHNHY | |
| | | TPPVLDSDGSFFLVSKLTVDKSRWQ | TQKSLSLSPG | |
| | | QGNVFSCSVMHEALHNHYTQKSLSL | (SEQ ID NO: 9) | |
| | | SPG | | |
| | | (SEQ ID NO: 286) | | |
| DNA549 | Hole: | AKTEPKSSDKTHTCPPCPAPELLGGPSVFL | EPKSSDKTHTCPPCPAPELLGGPSV | DKTHTCPPCPAPELLGGPSVFLFPPKPKDTL |
| | hFcIgG1 | FPPKPKOTLMISRTPEVTCVVVDVSHEDPE | FLFPPKPKDTLMISRTPEVTCVVVD | MISRTPEVTCVVVDVSHEDPEVKFNWYVDGV |
| | (N297A + | VKFNWYVDGVEVHNAKTKPREEQYASTYRV | VSHEDPEVKFNWYVQGVEVHNAKTK | EVHNAKTKPREEQYASTYRVVSVLTVLHQDW |
| | AKTEP | VSVLTVLHQDWLNGKEYKCKVSNKALPAPI | PREEQYASTYRVVSVLTVLHQDWLN | LNGKEYKCKVSNKALPAPIEKTISKAKGQPR |
| | KSS)- | EKTISKAKGQPREPQVCTLPPSRDELTKNQ | GKEYKCKVSNKALPAPIEKTISKAK | EPQVCTLPPSRDELTKNQVSLSCAVKGFYPS |
| | Hole: | VSLSCAVKGFYPSDIAVEWESNGQPENNYK | GQPREPQVCTLPPSRDELTKNQVSL | DIAVEWESNGQPENNYKTTPPVLDSDGSFFL |
| | hFc(N297A | TTPPVLDSDGSFFLVSKLTVDKSRWQQGNV | SCAVKGFYPSDIAVEWESNGQPENN | VSKLTVDKSRWQQGMVFSCSVMHEALHNHY |
| | + EPKSS)- | FSCSVMHEALHNHYTQKSLSLSPG | YKTTPPVLDSDGSFFLVSKLTVDKS | TQKSLSLSPG |
| | hFc(N297A)- | (SEQ ID NO: 287) | RWQQGNVFSCSVMHEALHNHYTQKS | (SEQ ID NO: 9) |
| | hCD122 | | LSLSPG | |
| | | | (SEQ ID NO: 285) | |
| DNA550 | Knob: | FPKSSDKTHTCPPCPAPELLGGPSVFLFPP | GSPG | VPLSLY |
| | hFclgG1 | KPKDTLMISRTPEVTCVVVDVSHEDPEVKF | (SEQ ID | (SEQ ID |
| | (N297A | NWYVDGVEVHNAKTKPREEQYASTYRVVSV | NO: 34) | NO: 28) |
| | + EPKSS)- | LTVLHQOWLNGKEYKCKVSNKALPAPIEKT | | |
| | [VPLSLY]- | ISKAKGQPREPQVYTLPPCRDELTKNQVSL | | |
| | hIL2 | WCLVKGFYPSDIAVEWESNGQPENNYKTTP | | |
| | (R38A, FA2A, | PVLDSDGSFFLYSKLTVDKSRYVQQGNVFS | | |
| | Y45A, | CSVMHEALHNHYTQKSLSLSPG | | |
| | E62A, | (SEQ ID NO: 288) | | |
| | C125A) | | | |
| DNA551 | Knob: | AKTDKTHTCPPCPAPELLGGPSVELFPPKP | GSPG | VPLSLY |
| | hFcIgG1 | KDTLMISRTPEVTCVVVDVSHEDPEVKFNW | (SEQ ID | (SEQ ID |
| | (N297A | YVDGVEVHNAKTKPREEQYASTYRVVSVLT | NO: 34) | NO: 28) |
| | + AKT)-[VPLSLY]- | VLHQDWLNGKEYKCKVSNKALPAPIEKTIS | | |
| | hIL2 | KAKGQPREPQVYTLPPCRDELTKNQVSLWC | | |
| | (R38A, F42A, | LVKGFYPSDIAVEWESNGQPENNYKTTPPV | | |
| | Y45A, | LDSDGSFFLYSKLTVDKSRWQQGNVFSCSV | | |
| | E62A, | MHEALHNHYTQKSLSLSPG | | |
| | C125A) | (SEQ ID NO: 289) | | |
| DNA552 | Knob: | AKTEPKSSDKTHTCPPCPAPELLGGPSVFLF | GSPG | VPLSLY |
| | hFcIgG1 | PPKPKDTLMISRTPEVTCVVVDVSHEDPEV | (SEQ ID | (SEQ ID |
| | (N297A | KFNVVYVDGVEVHNAKTKPREEQYASTYRV | NO: 34) | NO: 28) |
| | + AKTEPKSS) | VSVLTVLHQDWLNGKEYKCKVSNKALPAPI | | |
| | Knob: | EKTISKAKGQPREPQWTLPPCRDELTKNQV | | |
| | [VPLSLY]- | SLWCLVKGFYPSDIAVEWESNGQPENNYKT | | |
| | hIL2 | TPPVLDSDGSFFLYSKLTVDKSRVVQQGNV | | |
| | (R38A, F42A, | FSCSVMHEALHNHYTQKSLSLSPG | | |
| | Y45A, | (SEQ ID NO: 290) | | |
| | E62A, | | | |
| | C125A) | | | |
| DNA553 | Hole: | DKTHTCPPCPAPELLGGPSVFLFPPKPKDTL | GPPSG | DSGGFMLT |
| | hFc(N297A)- | MISRTPEVTCVVVDVSHEDPEVKFNWYVDGV | SSPG | (SEQ ID |
| | [DSGGFMLT]- | EVHNAKTKPREEQYASTYRVVSVLTVLHQDW | (SEQ ID | NO: 25) |
| | hCD122 | LNGKEYKCKVSNKALPAPIEKTISKAKGQPR | NO: 36) | |
| | | EPQVCTLPPSRDELTKNQVSLSCAVKGFYPS | | |
| | | DIAVEWESNGQPENNYKTTPPVLDSDGSFFL | | |
| | | VSKLTVDKSRWQQGMVFSCSVMHEALHNHY | | |
| | | TQKSLSLSPG | | |
| | | (SEQ ID NO: 9) | | |
| DNA554 | Knob: | DKTHTCPPCPAPELLGGPSVFLFPPK | GSPG | VPLSLY |
| | hFc(N297A)- | PKDTLMISRTPEVTCVVVDVSHEDP | (SEQ ID | (SEQ ID |
| | [VPLSLY]- | EVKFNWYVDGVEVHNAKTKPREEQY | NO: 34) | NO: 28) |
| | hIL2 | ASTYRVVSVLTVLHQDWLNGKEYKC | | |
| | (E15R, L18C, | KVSNKALPAPIEKTISKAKGQPREP | | |
| | D20R, | QVYTLPPCRDELTKNQVSLWCLVKG | | |
| | R38A, | FYPSDSAVEWESNGQPENNYKTTPP | | |
| | F42A, | VIDSDGSFFLYSKITVDKSRWQQGN | | |
| | Y45A, | VFSCSVMHEALHNHYTQKSLSLSPG | | |
| | E62A) | (SEQ ID NO: 12) | | |
| DNA563 | Knob: | DKTHTCPPCPAPELLGGPSVFLFPPK | GSPG | VPLSLY |
| | hFc(N297A)- | PKDTLMISRTPEVTCVVVDVSHEDP | (SEQ ID | (SEQ ID |
| | [VPLSLY]- | EVKFNWYVDGVEVHNAKTKPREEQY | NO: 34) | NO: 28) |
| | hIL2 | ASTYRVVSVLTVLHQDWLNGKEYKC | | |
| | (E15R, L18C, | KVSNKALPAPIEKTISKAKGQPREP | | |
| | D20R, | QVYTLPPCRDELTKNQVSLWCLVKG | | |
| | R38A, | FYPSDSAVEWESNGQPENNYKTTPP | | |
| | F42A, | VIDSDGSFFLYSKITVDKSRWQQGN | | |
| | Y45A, | VFSCSVMHEALHNHYTQKSLSLSPG | | |
| | E62A, | (SEQ ID NO: 12) | | |
| | N88L) | | | |
| DNA565 | Knob: | DKTHTCPPCPAPELLGGPSVFLFPPK | GSPG | VPLSLY |
| | hFc(N297A)- | PKDTLMISRTPEVTCVVVDVSHEDP | (SEQ ID | (SEQ ID |
| | [VPLSLY]- | EVKFNWYVDGVEVHNAKTKPREEQY | NO: 34) | NO: 28) |
| | hIL2 | ASTYRVVSVLTVLHQDWLNGKEYKC | | |
| | (E15R, L18C, | KVSNKALPAPIEKTISKAKGQPREP | | |
| | D20R, | QVYTLPPCRDELTKNQVSLWCLVKG | | |
| | R38A, | FYPSDSAVEWESNGQPENNYKTTPP | | |
| | F42A, | VIDSDGSFFLYSKITVDKSRWQQGN | | |
| | Y45A, | VFSCSVMHEALHNHYTQKSLSLSPG | | |
| | E62A, | (SEQ ID NO: 12) | | |
| | N88L) | | | |
| DNA566 | Knob: | DKTHTCPPCPAPELLGGPSVFLFPPK | GSPG | VPLSLY |
| | hFc(N297A)- | PKDTLMISRTPEVTCVVVDVSHEDP | (SEQ ID | (SEQ ID |
| | [VPLSLY]- | EVKFNWYVDGVEVHNAKTKPREEQY | NO: 34) | NO: 28) |
| | hIL2 | ASTYRVVSVLTVLHQDWLNGKEYKC | | |
| | (E15R, L18C, | KVSNKALPAPIEKTISKAKGQPREP | | |
| | R38A, | QVYTLPPCRDELTKNQVSLWCLVKG | | |
| | F42A, | FYPSDSAVEWESNGQPENNYKTTPP | | |
| | Y45A, | VIDSDGSFFLYSKITVDKSRWQQGN | | |
| | E62A, | VFSCSVMHEALHNHYTQKSLSLSPG | | |
| | N88L) | (SEQ ID NO: 12) | | |
| DNA567 | Knob: | DKTHTCPPCPAPELLGGPSVFLFPPK | GSPG | VPLSLY |
| | hFc(N297A)- | PKDTLMISRTPEVTCVVVDVSHEDP | (SEQ ID | (SEQ ID |
| | [VPLSLY]- | EVKFNWYVDGVEVHNAKTKPREEQY | NO: 34) | NO: 28) |
| | hIL2 | ASTYRVVSVLTVLHQDWLNGKEYKC | | |
| | (L18C, | KVSNKALPAPIEKTISKAKGQPREP | | |
| | D20R, | QVYTLPPCRDELTKNQVSLWCLVKG | | |
| | R38A, | FYPSDSAVEWESNGQPENNYKTTPP | | |
| | F42A, | VIDSDGSFFLYSKITVDKSRWQQGN | | |
| | Y45A, | VFSCSVMHEALHNHYTQKSLSLSPG | | |
| | E62A, | (SEQ ID NO: 12) | | |
| | N88L) | | | |
| DNA568 | Knob: | DKTHTCPPCPAPELLGGPSVFLFPPK | GSPG | VPLSLY |
| | hFc(N297A)- | PKDTLMISRTPEVTCVVVDVSHEDP | (SEQ ID | (SEQ ID |
| | [VPLSLY]- | EVKFNWYVDGVEVHNAKTKPREEQY | NO: 34) | NO: 28) |
| | hIL2 | ASTYRVVSVLTVLHQDWLNGKEYKC | | |
| | (E15F, | KVSNKALPAPIEKTISKAKGQPREP | | |
| | L18C, | QVYTLPPCRDELTKNQVSLWCLVKG | | |
| | D20R, | FYPSDSAVEWESNGQPENNYKTTPP | | |
| | R38A, | VIDSDGSFFLYSKITVDKSRWQQGN | | |
| | F42A, | VFSCSVMHEALHNHYTQKSLSLSPG | | |
| | Y45A, | (SEQ ID NO: 12) | | |
| | E62A, | | | |
| | N88L) | | | |
| DNA575 | Hole: | DKTHTCPPCPAPELLGGPSVFLFPPKPKDTL | PGSGS | AVNGTSQFTCF |
| | hFc(N297A, | MASRTPEVTCVVVDVSHEDPEVKFNWYVDG | (SEQ ID | YNSRANISCVW |
| | I253A)-hCD122 | VEVHNAKTKPREEQYASTYRVVSVLTVLHQ | NO: 14) | SQDGALQDTSC |
| | | DWLNGKEYKCKVSNKALPAPIEKTISKAKG | | QVHAWPDRRR |
| | | QPREPQVCTIPPSRDELTKNQVSLSCAVKG | | WNQTCELLPVS |
| | | FYPSDIAVEWESNGQPENNYKTTPPVLDSD | | QASWACNLILG |
| | | GSFFLVSKLTVDKSRWQQGNVFSCSVMHEA | | APDSQKLTTVDI |
| | | LHNHYTQKSLSLSPG (SEQ ID NO: 10) | | VTLRVLCREGVR |
| | | | | WRVMAIQDFK |
| | | | | PFENLRLMAPIS |
| | | | | LQVVHVETHRC |
| | | | | NISWEISQASHY |
| | | | | FERHLEFEARTL |
| | | | | SPGHTWEEAPL |
| | | | | LTLKQKQEWICL |
| | | | | ETLTPDTQYEFQ |
| | | | | VRVKPLQGEFTT |
| | | | | WSPWSQPLAFR |
| | | | | TKPAALGKD |
| | | | | (SEQ ID NO: 4) |
| DNA576 | Hole: | DKTHTCPPCPAPELLGGPSVFLFPP | PGSGS | AVNGTSQFTCFYNSRANISCVW |
| | hFc(N297A, | KPKDTLYITREPEVTCVVVDVSHED | (SEQ ID | SQDGALQDTSCQVHAWPDRRR |
| | M252Y, S254T, | PEVKFNWYVDGVEVHNAKTKPREEQ | NO: 14) | WNQTCELLPVSQASWACNLILG |
| | T256E)- | YASTYRVVSVLTVLHQDWLNGKEYK | | APDSQKLTTVDIVTLRVLCREGVR |
| | hCD122 | CKVSNKALPAPIEKTISKAKGQPRE | | WRVMAIQDFKPFENLRLMAPIS |
| | | PQVCTLPPSRDELTKNQVSLSCAVK | | LQVVHVETHRCNISWEISQASHY |
| | | GFYPSDIAVEWESNGQPENNYKTTP | | FERHLEFEARTLSPGHTWEEAPL |
| | | PVIDSDGSFFLVSKLTVDKSRWQQG | | LTLKQKQEWICLETLTPDTQYEFQ |
| | | NVFSCSVMHEALHNHYTQKSLSLSP | | VRVKPLQGEFTTWSPWSQPLAFR |
| | | G (SEQ ID NO: 292) | | TKPAALGKD |
| | | | | (SEQ ID NO: 4) |
| DNA577 | Knob: | DKTHTCPPCPAPELLGGPSVFLFPP | GGSSPPG | APTSSSTKKTQL |
| | hFc(N297, | KPKDTLMASRTPEVTCVVVDVSHED | GGSSG | QLEHLLLDLQMILNGINNYKNPKL |
| | I253A)- | PEVKFNWYVDGVEVHNAKTKPREEQ | GGSGP | TAMLTAKFAMPKKATELKHLQCL |
| | hIL2(R38A, | YASTYRVVSVLTVLHQDWLNGKEYK | (SEQ ID | EEALKPLEEVLNLAQSKNFHLRPR |
| | F42A, | CKVSNKALPAPIEKTISKAKGQPRE | NO: 23) | DLISNINVIVLELKGSETTFMCEY |
| | Y45A, E62A, | PQVYTLPPCRDELTKNQVSLWCLVK | | ADETATIVEFLNRWITFAQSIISTLT |
| | C125A) | GFYPSDIAVEWESNGQPENNYKTTP | | (SEQ ID NO: 3) |
| | | PVLDSDGSFFLYSKLTVDKSRWQQG | | |
| | | NVFSCSVMHEALHNHYTQKSLSLSP | | |
| | | G (SEQ ID NO: 13) | | |
| DNA578 | Knob: | DKTHTCPPCPAPELLGGPSVFLFPP | GGSSPPG | APTSSSTKKTQL |
| | hFc(N297A, | KPKDTLYITREPEVTCWVDVSHEDP | GGSSG | QLEHLLLDLQMILNGINNYKNPKL |
| | M252Y, S254T, | EVKFNWYVDGVEVHNAKTKPREEQY | GGSGP | TAMLTAKFAMPKKATELKHLQCL |
| | T256E)- | ASTYRWSVLTVLHQDWLNGKEYKCK | (SEQ ID | EEALKPLEEVLNLAQSKNFHLRPR |
| | hIL2 | VSNKALPAPIEKTISKAKGQPREPQ | NO: 23) | DLISNINVIVLELKGSETTFMCEY |
| | (R38A, F42A, | VYTLPPCRDELTKNQVSLWCLVKGF | | ADETATIVEFLNRWITFAQSIISTLT |
| | Y45A, E62A, | YPSDIAVEWESNGQPENNYKTTPPV | | (SEQ ID NO: 3) |
| | C125A) | LDSDGSFFLYSKLTVDKSRWQQGNV | | |
| | | FSCSVMHEALHNHYTQKSLSLSPG | | |
| | | (SEQ ID NO: 294) | | |
| DNA579 | Knob: | DKTHTCPPCPAPELLGGPSVFLFPP | GSPG | VPLSLY |
| | hFc(N297, | KPKDTLMASRTPEVTCVVVDVSHED | (SEQ ID | (SEQ ID |
| | I253A)- | PEVKFNWYVDGVEVHNAKTKPREEQ | NO: 34) | NO: 28) |
| | [VPLSLY]- | YASTYRVVSVLTVLHQDWLNGKEYK | | |
| | hIL2 | CKVSNKALPAPIEKTISKAKGQPRE | | |
| | (R38A, F42A, | PQVYTLPPCRDELTKNQVSLWCLVK | | |
| | Y45A, E62A, | GFYPSDIAVEWESNGQPENNYKTTP | | |
| | C125A) | PVLDSDGSFFLYSKLTVDKSRWQQG | | |
| | | NVFSCSVMHEALHNHYTQKSLSLSP | | |
| | | G (SEQ ID NO: 13) | | |
| DNA580 | Knob: | DKTHTCPPCPAPELLGGPSVFLFPP | GSPG | VPLSLY |
| | hFc(N297A, | KPKDTLYITREPEVTCWVDVSHEDP | (SEQ ID | (SEQ ID |
| | M252Y, S254T, | EVKFNWYVDGVEVHNAKTKPREEQY | NO: 34) | NO: 28) |
| | T256E)- | ASTYRWSVLTVLHQDWLNGKEYKCK | | |
| | [VPLSLY]- | VSNKALPAPIEKTISKAKGQPREPQ | | |
| | hIL2 | VYTLPPCRDELTKNQVSLWCLVKGF | | |
| | (R38A, F42A, | YPSDIAVEWESNGQPENNYKTTPPV | | |
| | Y45A, E62A, | LDSDGSFFLYSKLTVDKSRWQQGNV | | |
| | C125A) | FSCSVMHEALHNHYTQKSLSLSPG | | |
| | | (SEQ ID NO: 294) | | |
| DNA581 | Knob: | DKTHTCPPCPAPELLGGPSVFLFPPK | GSPG | VPLSLY |
| | hFc(N297A)- | PKDTLMISRTPEVTCVVVDVSHEDP | (SEQ ID | (SEQ ID |
| | [VPLSLY]- | EVKFNWYVDGVEVHNAKTKPREEQY | NO: 34) | NO: 28) |
| | hIL2(L18C, | ASTYRVVSVLTVLHQDWLNGKEYKC | | |
| | R38A, | KVSNKALPAPIEKTISKAKGQPREP | | |
| | F42A, Y45A, | QVYTLPPCRDELTKNQVSLWCLVKG | | |
| | E62A) | FYPSDSAVEWESNGQPENNYKTTPP | | |
| | | VIDSDGSFFLYSKITVDKSRWQQGN | | |
| | | VFSCSVMHEALHNHYTQKSLSLSPG | | |
| | | (SEQ ID NO: 12) | | |
| DNA582 | Knob: | DKTHTCPPCPAPELLGGPSVFLFPPK | GSPG | VPLSLY |
| | hFc(N297A)- | PKDTLMISRTPEVTCVVVDVSHEDP | (SEQ ID | (SEQ ID |
| | [VPLSLY]- | EVKFNWYVDGVEVHNAKTKPREEQY | NO: 34) | NO: 28) |
| | hIL2(H16Y, | ASTYRVVSVLTVLHQDWLNGKEYKC | | |
| | R38A, F42A, | KVSNKALPAPIEKTISKAKGQPREP | | |
| | Y45A, E62A, | QVYTLPPCRDELTKNQVSLWCLVKG | | |
| | C125A) | FYPSDSAVEWESNGQPENNYKTTPP | | |
| | | VIDSDGSFFLYSKITVDKSRWQQGN | | |
| | | VFSCSVMHEALHNHYTQKSLSLSPG | | |
| | | (SEQ ID NO: 12) | | |
| DNA583 | Knob: | DKTHTCPPCPAPELLGGPSVFLFPPK | GSPG | VPLSLY |
| | hFc(N297A)- | PKDTLMISRTPEVTCVVVDVSHEDP | (SEQ ID | (SEQ ID |
| | [VPISLY]- | EVKFNWYVDGVEVHNAKTKPREEQY | NO: 34) | NO: 28) |
| | hIL2(H16E, | ASTYRVVSVLTVLHQDWLNGKEYKC | | |
| | R38A, F42A, | KVSNKALPAPIEKTISKAKGQPREP | | |
| | Y45A, E62A, | QVYTLPPCRDELTKNQVSLWCLVKG | | |
| | C125A) | FYPSDSAVEWESNGQPENNYKTTPP | | |
| | | VIDSDGSFFLYSKITVDKSRWQQGN | | |
| | | VFSCSVMHEALHNHYTQKSLSLSPG | | |
| | | (SEQ ID NO: 12) | | |
| DNA584 | Knob: | DKTHTCPPCPAPELLGGPSVFLFPPK | GSPG | VPLSLY |
| | hFc(N297A)- | PKDTLMISRTPEVTCVVVDVSHEDP | (SEQ ID | (SEQ ID |
| | [VPLSLY]- | EVKFNWYVDGVEVHNAKTKPREEQY | NO: 34) | NO: 28) |
| | hIL2 | ASTYRVVSVLTVLHQDWLNGKEYKC | | |
| | (D20L, R38A, | KVSNKALPAPIEKTISKAKGQPREP | | |
| | F42A, Y45A, | QVYTLPPCRDELTKNQVSLWCLVKG | | |
| | E62A, C125A) | FYPSDSAVEWESNGQPENNYKTTPP | | |
| | | VIDSDGSFFLYSKITVDKSRWQQGN | | |
| | | VFSCSVMHEALHNHYTQKSLSLSPG | | |
| | | (SEQ ID NO: 12) | | |
| DNA585 | Knob: | DKTHTCPPCPAPELLGGPSVFLFPPK | GSPG | VPLSLY |
| | hFc(N297A)- | PKDTLMISRTPEVTCVVVDVSHEDP | (SEQ ID | (SEQ ID |
| | [VPLSLY]- | EVKFNWYVDGVEVHNAKTKPREEQY | NO: 34) | NO: 28) |
| | hIL2(H16Y, L18C, | ASTYRVVSVLTVLHQDWLNGKEYKC | | |
| | R38A, F42A, | KVSNKALPAPIEKTISKAKGQPREP | | |
| | Y45A, E62A) | QVYTLPPCRDELTKNQVSLWCLVKG | | |
| | | FYPSDSAVEWESNGQPENNYKTTPP | | |
| | | VIDSDGSFFLYSKITVDKSRWQQGN | | |
| | | VFSCSVMHEALHNHYTQKSLSLSPG | | |
| | | (SEQ ID NO: 12) | | |
| DNA586 | Knob: | DKTHTCPPCPAPELLGGPSVFLFPPK | GSPG | VPLSLY |
| | hFc(N297A)- | PKDTLMISRTPEVTCVVVDVSHEDP | (SEQ ID | (SEQ ID |
| | [VPLSLY]- | EVKFNWYVDGVEVHNAKTKPREEQY | NO: 34) | NO: 28) |
| | hIL2(H16E, L18C, | ASTYRVVSVLTVLHQDWLNGKEYKC | | |
| | R38A, F42A, | KVSNKALPAPIEKTISKAKGQPREP | | |
| | Y45A, E62A) | QVYTLPPCRDELTKNQVSLWCLVKG | | |
| | | FYPSDSAVEWESNGQPENNYKTTPP | | |
| | | VIDSDGSFFLYSKITVDKSRWQQGN | | |
| | | VFSCSVMHEALHNHYTQKSLSLSPG | | |
| | | (SEQ ID NO: 12) | | |
| DNA587 | Knob: | DKTHTCPPCPAPELLGGPSVFLFPPK | GSPG | VPLSLY |
| | hFc(N297A)- | PKDTLMISRTPEVTCVVVDVSHEDP | (SEQ ID | (SEQ ID |
| | [VPLSLY]- | EVKFNWYVDGVEVHNAKTKPREEQY | NO: 34) | NO: 28) |
| | hIL2(L18C, D20L, | ASTYRVVSVLTVLHQDWLNGKEYKC | | |
| | R38A, F42A, | KVSNKALPAPIEKTISKAKGQPREP | | |
| | Y45A, E62A) | QVYTLPPCRDELTKNQVSLWCLVKG | | |
| | | FYPSDSAVEWESNGQPENNYKTTPP | | |
| | | VIDSDGSFFLYSKITVDKSRWQQGN | | |
| | | VFSCSVMHEALHNHYTQKSLSLSPG | | |
| | | (SEQ ID NO: 12) | | |
| DNA588 | Knob: | DKTHTCPPCPAPELLGGPSVFLFPPK | GSPG | VPLSLY |
| | hFc(N297A)- | PKDTLMISRTPEVTCVVVDVSHEDP | (SEQ ID | (SEQ ID |
| | [VPLSLY]- | EVKFNWYVDGVEVHNAKTKPREEQY | NO: 34) | NO: 28) |
| | hIL2(H16Y, L18C, | ASTYRVVSVLTVLHQDWLNGKEYKC | | |
| | D20L, R38A, | KVSNKALPAPIEKTISKAKGQPREP | | |
| | F42A, Y4SA, | QVYTLPPCRDELTKNQVSLWCLVKG | | |
| | E62A) | FYPSDSAVEWESNGQPENNYKTTPP | | |
| | | VIDSDGSFFLYSKITVDKSRWQQGN | | |
| | | VFSCSVMHEALHNHYTQKSLSLSPG | | |
| | | (SEQ ID NO: 12) | | |
| DNA589 | Knob: | DKTHTCPPCPAPELLGGPSVFLFPPK | GSPG | VPLSLY |
| | hFc(N297A)- | PKDTLMISRTPEVTCVVVDVSHEDP | (SEQ ID | (SEQ ID |
| | [VPISLY]- | EVKFNWYVDGVEVHNAKTKPREEQY | NO: 34) | NO: 28) |
| | hIL2(H16E, L18C, | ASTYRVVSVLTVLHQDWLNGKEYKC | | |
| | D20L, R38A, | KVSNKALPAPIEKTISKAKGQPREP | | |
| | F42A, Y4SA, | QVYTLPPCRDELTKNQVSLWCLVKG | | |
| | E62A) | FYPSDSAVEWESNGQPENNYKTTPP | | |
| | | VIDSDGSFFLYSKITVDKSRWQQGN | | |
| | | VFSCSVMHEALHNHYTQKSLSLSPG | | |
| | | (SEQ ID NO: 12) | | |
| DNA603 | Hole: | ESKYGPPCPPCPAPEFLGGP | PGSGS | AVNGTSQFTCFYNSRANISCVW |
| | hFcIgG4- | SVFLFPPKPKDTLMISRTPE | (SEQ ID | SQDGALQDTSCQVHAWPDRRR |
| | hCD122 | VTCVVVDVSQEDPEVQFNWY | NO: 14) | WNQTCELLPVSQASWACNLILG |
| | | VDGVEVHNAKTKPREEQFNS | | APDSQKLTTVDIVTLRVLCREGVR |
| | | TYRVVSVLTVLHQDWLNGKE | | WRVMAIQDFKPFENLRLMAPIS |
| | | YKCKVSNKGLPSSIEKTISK | | LQVVHVETHRCNISWEISQASHY |
| | | AKGQPREPQVCTLPPSQEEM | | FERHLEFEARTLSPGHTWEEAPL |
| | | TKNQVSLSCAVKGFYPSDIA | | LTLKQKQEWICLETLTPDTQYEFQ |
| | | VEWESNGQPENNYKTTPPVL | | VRVKPLQGEFTTWSPWSQPLAFR |
| | | DSDGSFFLYSRLTVDKSRWQ | | TKPAALGKD |
| | | EGNVFSCSVMHEALHNHYTQ | | (SEQ ID NO: 4) |
| | | KSLSLSLG | | |
| | | (SEQ ID NO: 295) | | |
| DNA604 | Knob: | ESKYGPPCPPCPAPEFLGGP | GSSPPGG | APTSSSTKKTQL |
| | hFc(N297A)- | SVFLFPPKPKDTLMISRTPE | GSSGG | QLEHLLLDLQMILNGINNYKNPKL |
| | hIL2 | VTCVVVDVSQEDPEVQFNWY | GSGP | TAMLTAKFAMPKKATELKHLQCL |
| | (R38A, | VDGVEVHNAKTKPREEQFNS | (SEQ ID | EEALKPLEEVLNLAQSKNFHLRPR |
| | F42A, | TYRVVSVLTVLHQDWLNGKE | NO: 23) | DLISNINVIVLELKGSETTFMCEY |
| | Y45A, | YKCKVSNKGLPSSIEKTISK | | ADETATIVEFLNRWITFAQSIISTLT |
| | E62A, | AKGQPREPQVYTLPPSQEEM | | (SEQ ID NO: 3) |
| | C125A) | TKNQVSLSWCLVKGFYPSDI | | |
| | | AVEWESNGQPENNYKTTPPV | | |
| | | LDSDGSFFLYSRLTVDKSRW | | |
| | | QEGNVFSCSVMHEALHNHYT | | |
| | | QKSLSLSLG | | |
| | | (SEQ ID NO: 296) | | |
| DNA605 | Knob: hFc(N297A)- | ESKYGPPCPPCPAPEFLGGP | GSPG | VPLSLY |
| | [VPLSLY]- | SVFLFPPKPKDTLMISRTPE | (SEQ ID | (SEQ ID |
| | hIL2 | VTCVVVDVSQEDPEVQFNWY | NO: 34) | NO: 2 |
| | (R38A, | VDGVEVHNAKTKPREEQFNS | | 8) |
| | F42A, Y45A, | TYRVVSVLTVLHQDWLNGKE | | |
| | E62A, | YKCKVSNKGLPSSIEKTISK | | |
| | C125A) | AKGQPREPQVYTLPPSQEEM | | |
| | | TKNQVSLSWCLVKGFYPSDI | | |
| | | AVEWESNGQPENNYKTTPPV | | |
| | | LDSDGSFFLYSRLTVDKSRW | | |
| | | QEGNVFSCSVMHEALHNHYT | | |
| | | QKSLSLSLG | | |
| | | (SEQ ID NO: 296) | | |
| DNA606 | Knob: | DKTHTCPPCPAPELLGGPSVFLFPPKPKDTL | GPPSGSSP | RAAAVKSP |
| | hFc(N297A)- | MISRTPEVTCVVVDVSHEDPEVKFNWYVDGV | (SEQ ID | (SEQ ID |
| | [RAAAVKSP]- | EVHNAKTKPREEQYASTYRVVSVLTVLHQDW | NO: 37) | NO: 27) |
| | hCD122 | LNGKEYKCKVSNKALPAPIEKTISKAKGQPR | | |
| | | EPQVCTLPPSRDELTKNQVSLSCAVKGFYPS | | |
| | | DIAVEWESNGQPENNYKTTPPVLDSDGSFFL | | |
| | | VSKLTVDKSRWQQGMVFSCSVMHEALHNHY | | |
| | | TQKSLSLSPG | | |
| | | (SEQ ID NO: 9) | | |
| DNA608 | Hole: | DKTHTCPPCPAPELLGGPSVFLFPP | GPPSGSSP | MPYDLYHP |
| | hFc(N297A, | KPKDTLMASRTPEVTCVVVDVSHEQ | (SEQ ID | (SEQ ID |
| | I253A)- | PEVKFNWYVDGVEVHNAKTKPREEQ | NO: 37) | NO: 24) |
| | [MPYDLYHP]- | YASTYRVVSVLTVLHQDWLNGKEYK | | |
| | hCD122 | CKVSNKALPAPIEKTISKAKGQPRE | | |
| | | PQVCTLPPSRDELTKNQVSLSCAVK | | |
| | | GFYPSDIAVEWESNGQPENNYKTTP | | |
| | | PVLDSDGSFFIVSKLTVDKSRWQQG | | |
| | | NVFSCSVMHEALHNHYTQKSLSLSP | | |
| | | G (SEQ ID NO: 10) | | |
| DNA609 | Hole: | DKTHTCPPCPAPELLGGPSVFLFPP | GPPSG | VPLSLY |
| | hFc(N297A, | KPKDTLMASRTPEVTCVVVDVSHEQ | SSPG | (SEQ ID |
| | I253A)- | PEVKFNWYVDGVEVHNAKTKPREEQ | (SEQ ID | NO: 28) |
| | [VPLSLY]- | YASTYRVVSVLTVLHQDWLNGKEYK | NO: 36) | |
| | hCD122 | CKVSNKALPAPIEKTISKAKGQPRE | | |
| | | PQVCTLPPSRDELTKNQVSLSCAVK | | |
| | | GFYPSDIAVEWESNGQPENNYKTTP | | |
| | | PVLDSDGSFFIVSKLTVDKSRWQQG | | |
| | | NVFSCSVMHEALHNHYTQKSLSLSP | | |
| | | G (SEQ ID NO: 10) | | |
| DNA612 | Hole: | DKTHTCPPCPAPELLGGPSVFLFPPKPKDTL | GPPSGSSP | MPYDLYHP |
| | hFc(N297A, | MISRTPEVTCVVVDVSHEDPEVKFNWYVDGV | (SEQ ID | (SEQ ID |
| | I253A)- | EVHNAKTKPREEQYASTYRVVSVLTVLHQDW | NO: 37) | NO: 24) |
| | [MPYDLYHP]- | LNGKEYKCKVSNKALPAPIEKTISKAKGQPR | | |
| | hCD122 | EPQVCTLPPSRDELTKNQVSLSCAVKGFYPS | | |
| | (C122S, | DIAVEWESNGQPENNYKTTPPVLDSDGSFFL | | |
| | C168S) | VSKLTVDKSRWQQGMVFSCSVMHEALHNHY | | |
| | | TQKSLSLSPG | | |
| | | (SEQ ID NO: 9) | | |
| DNA614 | Hole: | DKTHTCPPCPAPELLGGPSVFLFPPKPKDTL | GPPSG | DSGGFMLT |
| | hFc(N297A)- | MISRTPEVTCVVVDVSHEDPEVKFNWYVDGV | SSPG | (SEQ ID |
| | [DSGGFMLT]- | EVHNAKTKPREEQYASTYRVVSVLTVLHQDW | (SEQ ID | NO: 25) |
| | hCD122 | LNGKEYKCKVSNKALPAPIEKTISKAKGQPR | NO: 36) | |
| | (C122S, | EPQVCTLPPSRDELTKNQVSLSCAVKGFYPS | | |
| | C168S) | DIAVEWESNGQPENNYKTTPPVLDSDGSFFL | | |
| | | VSKLTVDKSRWQQGMVFSCSVMHEALHNHY | | |
| | | TQKSLSLSPG | | |
| | | (SEQ ID NO: 9) | | |
| DNA621 | Hole: | ESKYGPPCPPCPAPELLGGPSVFLF | PSGSSPG | VPLSLY |
| | hFcIgG4- | PPKPKDTLMISRTPEVTCVVVDVSH | (SEQ ID | (SEQ ID |
| | [VPLSLY]- | EDPEVKFNWYVDGVEVHNAKTKPRE | NO: 313) | NO: 28) |
| | hCD122 | EQYASTRYRVVSVLTVLHQDWLNGK | | |
| | | EYKCKVSNKGLPSSIEKTISKAKGQ | | |
| | | PREPQVCTLPPSQEEMTKNQVSLSC | | |
| | | AVKGFYPSDIAVEWESMGQPENNYK | | |
| | | TTPPVLDSDGSFFLYSRLTVDKSRW | | |
| | | QEGNVFSCSVMHEALHNHYTQKSLS | | |
| | | LSLGGP (SEQ NO: 297) | | |
| DNA623 | Knob: | DKTHTCPPCPAPELLGGPSVFLFPP | GGSSPP | MPYDLYHP |
| | hFc(N297A, | KPKDTLMASRTPEVTCVVVDVSHED | (SEQ ID | (SEQ ID |
| | I253A)- | PEVKFNWYVDGVEVHNAKTKPREEQ | NO: 32) | NO: 24) |
| | [MPYDLYHP]- | YASTYRVVSVLTVLHQDWLNGKEYK | | |
| | hIL2(R38A, | CKVSNKALPAPIEKTISKAKGQPRE | | |
| | F42A, | PQVYTLPPCRDELTKNQVSLWCLVK | | |
| | Y45A, E62A, | GFYPSDIAVEWESNGQPENNYKTTP | | |
| | C125A) | PVLDSDGSFFLYSKLTVDKSRWQQG | | |
| | | NVFSCSVMHEALHNHYTQKSLSLS | | |
| | | PG (SEQ ID NO: 13) | | |
| DNA625 | Hole: | DKTHTCPPCPAPELLGGPSVFLFPP | | |
| | hFc(N297, | KPKDTLMASRTPEVTCVVVDVSHEQ | | |
| | I253A) | PEVKFNWYVDGVEVHNAKTKPREEQ | | |
| | | YASTYRVVSVLTVLHQDWLNGKEYK | | |
| | | CKVSNKALPAPIEKTISKAKGQPRE | | |
| | | PQVCTLPPSRDELTKNQVSLSCAVK | | |
| | | GFYPSDIAVEWESNGQPENNYKTTP | | |
| | | PVLDSDGSFFIVSKLTVDKSRWQQG | | |
| | | NVFSCSVMHEALHNHYTQKSLSLSP | | |
| | | G (SEQ ID NO: 10) | | |
| DNA626 | Hole: | ESKYGPPCPPCPAPEFLGGPSVFLFPPKPK | | |
| | hFcIGg4 | DTLMISRTPEVTCVVVDVSQEDPEVQFNWY | | |
| | | VDGVEVHNAKTKPREEQFNSTYRVVSVLTV | | |
| | | LHQDWLNGKEYKCKVSNKGLPSSIEKTISK | | |
| | | AKGQPREPQVCTLPPSQEEMTKNQVSLSCA | | |
| | | VKGFYPSDIAVEWESNGQPENNYKTTPPVL | | |
| | | DSDGSFFLYSRLTVDKSRWQEGNVFSCSVM | | |
| | | HEALHNHYTQKSLSLSLGPG | | |
| | | (SEQ ID NO: 298) | | |
| DNA669 | Hole: | DKTHTCPPCPAPELLGGPSVFLF | PGSGS | AVNGTSQFTCFYNSRANISCVW |
| | hFc- | PPKPKDTLMISRTPEVTCVVVDV | (SEQ ID | SQDGALQDTSCQVHAWPDRRR |
| | hCD122 | SHEDPEVKFNWYVDGVEVHNAKT | NO: 14) | WNQTCELLPVSQASWACNLILG |
| | | KPREEQYNSTYRVVSVLWLHQDW | | APDSQKLTTVDIVTLRVLCREGVR |
| | | LNGKEYKCKVSNKALPAPIEHIS | | WRVMAIQDFKPFENLRLMAPIS |
| | | KAKGQPREPQVCTLPPSRDELTK | | LQVVHVETHRCNISWEISQASHY |
| | | NQVSLSCAVKGFYPSDIAVEWES | | FERHLEFEARTLSPGHTWEEAPL |
| | | NGQPENNYKTTPPVLDSDGSFFL | | LTLKQKQEWICLETLTPDTQYEFQ |
| | | VSKLTVDKSRWQQGNVFSCSVMH | | VRVKPLQGEFTTWSPWSQPLAFR |
| | | EALHNHYTQKSLSLSPG | | TKPAALGKD |
| | | (SEQ ID NO: 8) | | (SEQ ID NO: 4) |
| DNA670 | Knob: hFc- | DKTHTCPPCPAPELLGGPSVFLFPP | GGSSPPG | APTSSSTKKTQL |
| | hIL2 | KPKDTLMISRTPEVTCVVVDVSHED | GGSSG | QLEHLLLDLQMILNGINNYKNPKL |
| | (R38A, F42A, | PEVKFNWYVDGVEVHNAKTKPREEQ | GGSGP | TAMLTAKFAMPKKATELKHLQCL |
| | Y45A, E62A, | YNSTYRVVSVLTVLHQDWLNGKEY | (SEQ ID | EEALKPLEEVLNLAQSKNFHLRPR |
| | C125A) | KCKVSNKALPAPIEKTISKAKGQPR | NO: 23) | DLISNINVIVLELKGSETTFMCEY |
| | | EPQVYTLPPCRDEL TKNQVSLWCL | | ADETATIVEFLNRWITFAQSIISTLT |
| | | VKGFYPSDIAVEWESNGQPENNYKT | | (SEQ ID NO: 3) |
| | | TPPVLDSDGSFFLYSKLTVDKSRWQ | | |
| | | QGNVFSCSVMHEALHNHYTQKSLSL | | |
| | | SPG | | |
| | | (SEQ ID NO: 11) | | |
| DNA671 | Knob: hFc- | DKTHTCPPCPAPELLGGPSVFLFPP | GSPG | VPLSLY |
| | [VPLSLY]- | KPKDTLMISRTPEVTCVVVDVSHED | (SEQ ID | (SEQ ID |
| | hIL2 | PEVKFNWYVDGVEVHNAKTKPREEQ | NO: 34) | NO: 28) |
| | (R38A, F42A, | YNSTYRVVSVLTVLHQDWLNGKEY | | |
| | Y45A, E62A, | KCKVSNKALPAPIEKTISKAKGQPR | | |
| | C125A) | EPQVYTLPPCRDEL TKNQVSLWCL | | |
| | | VKGFYPSDIAVEWESNGQPENNYKT | | |
| | | TPPVLDSDGSFFLYSKLTVDKSRWQ | | |
| | | QGNVFSCSVMHEALHNHYTQKSLSL | | |
| | | SPG | | |
| | | (SEQ ID NO: 11) | | |
| DNA672 | Hole: | DKTHTCPPCPAPELLGGPSVFLF | GPPSGSSPG | VPLSLY |
| | hFcIgG4- | PPKPKDTLMISRTPEVTCVVVDV | (SEQ ID | (SEQ ID |
| | [VPLSLY]- | SHEDPEVKFNWYVDGVEVHNAKT | NO: 36) | NO: 28) |
| | hCD122 | KPREEQYNSTYRVVSVLWLHQDW | | |
| | | LNGKEYKCKVSNKALPAPIEHIS | | |
| | | KAKGQPREPQVCTLPPSRDELTK | | |
| | | NQVSLSCAVKGFYPSDIAVEWES | | |
| | | NGQPENNYKTTPPVLDSDGSFFL | | |
| | | VSKLTVDKSRWQQGNVFSCSVMH | | |
| | | EALHNHYTQKSLSLSPG | | |
| | | (SEQ ID NO: 8) | | |

| NAME | NEW | COMPONENT4 | COMPONENT5 | FULL |
|---|---|---|---|---|
| | NAMES | SEQUENCE | SEQUENCE | SEQUENCE |
| DNA158 | Hole: | | | DKTHTCPPCPAPELLGGPSVFLFPPKPKDT |
| | hFc(N297A) | | | LMISRTPEVTCVVVDVSHEDPEVKFNWYVD |
| | | | | GVEVHNAKTKPREEQYASTYRVVSVLTVLH |
| | | | | QDWLNGKEYKCKVSNKALPAPIEKTISKAK |
| | | | | GQPREPQVCTLPPSRDELTKNQVSLSCAVK |
| | | | | GFYPSDIAVEWESNGQPENNYKTTPPVLDS |
| | | | | DGSFFLVSKLTVDKSRWQQGNVFSCSVMHE |
| | | | | ALHNHYTQKSLSLSPG |
| | | | | (SEQ ID NO: 9) |
| DNA187 | Hole: | | | DKTHTCPPCPAPELLGGPSVFLFPPKPKDT |
| | hFc(N297A)- | | | LMISRTPEVTCVVVDVSHEDPEVKFNWYVD |
| | hCD122 | | | GVEVHNAKTKPREEQYASTYRVVSVLTVLH |
| | | | | QBWLNGKEYKCKVSNKALPAPIEKTISKAK |
| | | | | GQPREPQVCTLPPSRDELTKNQVSLSCAVK |
| | | | | GFYPSDIAVEWESNGQPENNYKTTPPVLDS |
| | | | | DGSFFLVSKLTVDKSRWQQGNVFSCSVMHE |
| | | | | ALHNHYTQKSLSLSPGPGSGSAVWGTSQFT |
| | | | | CFYNSRANISCVWSQDGALQDTSCQVHAWP |
| | | | | DRRRWNQTCELLPVSQASWACNLILGAPDS |
| | | | | QKLTTVDIVTLRVLCREGVRWRVMAIQDFK |
| | | | | PFENLRLMAPISLQVVHVETHBCNISWEIS |
| | | | | QASHYFERHLEFEARTLSPGHTWEEAPLLT |
| | | | | LKQKQEWICLETLTPDTQYEPQVRVKPLQG |
| | | | | EFTTWSPWSQFLAFRTKPAALGKD |
| | | | | (SEQ ID NO: 38) |
| DNA255 | Knob: | | | DKTHTCPPCPAPELLGGPSVFLFPPKPKDT |
| | hFc(N297A)- | | | LMISRTPEVTCVVVDVSHEDPEVKFNWYVD |
| | bIL2(R38A, | | | GVEVHNAKTKPREEQYASTYRVVSVLTVLH |
| | F42A, | | | QDWLNGKEYKCKVSNKALPAPIEKTISKAK |
| | Y45A, E62A, | | | GQPREPQVYTLPPCRDELTKNQVSLWCLVK |
| | C125A) | | | GFYPSDIAVEWESNGQPENNYKTTPPVLDS |
| | | | | DGSFFLYSKLTVDKSRWQQGNVFSCSVMHE |
| | | | | ALHNHYTQKSLSLSPGGGSSPPGGGSSGGG |
| | | | | SGPAPTSSSTKKTQLQLEHLLLDLQMILNG |
| | | | | INNYKNPKLTAMLTAKFAMPKKATELKHLQ |
| | | | | CLEEALKPLEEVLNAQSKNFHLRPRDLISN |
| | | | | INVIVLELKGSETTFMCEYADETATIVEFL |
| | | | | NRWITFAQSIISTLT |
| | | | | (SEQ ID NO: 51) |
| DNA263 | Knob: | SGP(SEQ | APTSSSTKKTQLQLEHLLLDLQMILNGINNYKNPKLT | DKTHTCPPCPAPELLGGPSVFLFPPKPKDT |
| | hFc(N297A)- | ID NO: | AMLTAKFAMPKKATELKHLQCLEEALKPLEEVLNLAQ | LMISRTPEVTCVVVDVSHEDPEVKFNWYVD |
| | [VPLSLY]- | 23) | SKNFHLRPRDLISNINVIVLELKGSETTFMCEYADET | GVEVHNAKTKPREEQYASTYRVVSVLTVLH |
| | hIL2(R38A, | | ATIVEFLNRWITFAQSIISTLT | QDWLNGKEYKCKVSNKALPAPIEKTISKAK |
| | F42A, | | (SEQ ID NO: 3) | GQPREPQVYTLPPCRDELTKNQVSLWCLVK |
| | Y45A, E62A, | | | GFYPSDIAVEWESNGQPENNYKTTPPVLDS |
| | C525A) | | | DGSFFLYSKLTVDKSRWQQGNVFSCSVMHE |
| | | | | ALHNHYTQKSLSLSFGGSPGVPLSLYSGPA |
| | | | | PTSSSTKKTQLQLEHLLLDLQMILNGINNY |
| | | | | KNPKLTAMLTAKFAMPKKATELKHLQCLEE |
| | | | | ALKPLEEVLNLAQSKNFHLRPRDLISNINV |
| | | | | IVLELKGSETTFMCEYADETATIVE |
| | | | | FLNRWITFAQSIISTLT |
| | | | | (SEQ ID NO: 49) |
| DNA278 | Knob: | SGP (SEQ | APTSSSTKKTQLQLEHLLLDLQMILNGINNYKNPKLT | DKTHTCPPCPAPELLGGPSVFLFPPKPKDT |
| | hFc(N297A)- | ID NO: | RMLTFKFYMPKKATELKHLQCLEEELKPLEEVLNLAQ | LMISRTPEVTCVVVDVSHEDPEVKFNWYVD |
| | [DSGGFMLT]- | 23) | SKNFHLRPRDLISNINVIVLELKGSETTFMCEYADET | GVEVHNAKTKPREEQYASTYRVVSVLTVLH |
| | hIL2(C125A) | | ATIVEFLNRWITFAQSIISTLT | QDWLNGKEYKCKVSNKALPAPIEKTISKAK |
| | | | (SEQ ID NO: 62) | GQPREPQVYTLPPCRDELTKNQVSLWCLVK |
| | | | | GFYPSDIAVEWESNGQPENNYKTTPPVLDS |
| | | | | DGSFFLYSKLTVDKSRWQQGNVFSCSVMHE |
| | | | | ALHNHYTQKSLSLSPGGSGPDSGGFMLTSG |
| | | | | PAPTSSSTKKTQLQLEHLLLDLQMILNGIN |
| | | | | NYKNPKLTRMLTSKFYMPKKATELKHLQCL |
| | | | | EEELKPLEEVLNLAQSKNFHLRPRDLISNI |
| | | | | NVIVLELKGSETTFMCEYADETATIVEFLN |
| | | | | RWITFAQSIISTLT |
| | | | | (SEQ ID NO: 357) |
| DNA281 | Knob: | SGP(SEQ | APTS8STKKTQLQLEHLLLDLQMILNGINNYKNPKLT | DKTHTCPPCPAPELLGGPSVFLFPPKPKDT |
| | hFc(N297A)- | ID NO: | AMLTAKFAMPKKATELKHLQCLEEALKPLEEYLNLAQ | LMISRTPEVTCVVVDVSHEDPEVKFNWYVD |
| | [DSGGFMLT]- | 23) | SKNFHLRPRDLISNINVIVLELKGSETTFMCEYADET | GVEVHNAKTKPREEQYASTYRVVSVLTVLH |
| | hIL2(R38A, | | ATIVEFLNRWITFAQSIISTLT | QDWLNGKEYKCKVSNKALPAPIEKTISKAK |
| | F42A, | | (SEQ ID NO: 3) | GQPREPQVYTLPPCRDELTKNQVSLWCLVK |
| | Y45A, E62A, | | | GFYPSDIAVEWSSNGQPENNYKTTPPVLDS |
| | C125A) | | | DGSFFLYSKLTVDKSRWQQGNVFSCSVMHE |
| | | | | ALKNHYTQKSLSLSPGGSGPDSGGFMLTSG |
| | | | | PAFTSSSTKKTQLQLEHLLLDLQMILNGIN |
| | | | | NYKKPKLTAMLTAKFAMPKKATELKHLQCL |
| | | | | EEALKPLEEVLNLAQSKNFHLRPRDLISNI |
| | | | | NVIVLELKGSETTFMCEYADETATIVEFLN |
| | | | | RWITFAQSIISTLT |
| | | | | (SEQ ID NO: 48) |
| DNA440 | Hole: | | | DKTHTCPPCPAPELLGGPSVFLFPPKPKDT |
| | hFc(N297A)- | | | LMISRTPEVTCVVVDVSHEDPEVKFNWYVD |
| | bCD122 | | | GVEVHNAKTKPREEQYASTYRVVSVLTVLH |
| | (C3l22S, | | | QDWLNGKEYKCKVSNKALPAPIEKTISKAK |
| | C168S) | | | GQPREPQVCTLPPSRDELTKNQVSLSCAVK |
| | | | | GFYPSDIAVEWSSNGQPENNYKTTPPVLDS |
| | | | | DGSFFLVSKLTVDKSRWQQGNVFSCSVMHE |
| | | | | ALHNHYTQKSLSLSPGPGSGSAVNGTSQFT |
| | | | | CFYNSRANISCVWSQDGALQDTSCQVHAWP |
| | | | | DRRRWNQTCELLPVSQASWACNLILGAPDS |
| | | | | QKLTTVDIVTLRVLCREGVRWRVMAIQDFK |
| | | | | PFENLRLMAPISLQVVHVETHRSNISWEIS |
| | | | | QASHYFERHLEFEARTLSPGHTWEEAPLLT |
| | | | | LKQKQEWISLETLTPDTQYEFQVRVKPLQG |
| | | | | EFTTWSPWSQPLAFRTKPAALGKD |
| | | | | (SEQ ID NO: 39) |
| DNA476 | Knob: | GP | APTSSSTKKTQLQLEHLLLDLQMI | DKTHTCPPCPAPELLGGPSVFLFPPKPKDTLMISRTPEVT |
| | hFc(N297A)- | | LNGINNYKNPKLTRMLTSKFYMPK | CVVVDVSHEDPEVKFNWYVDGVEVHNAKTKPREEQYASTY |
| | [NPMGSDP | | KATELKHLQCLEESLKPLEEVLNL | RVVSVLTVLHQDWLNGKEYKCKVSNKALPAPIEKTISKAK |
| | VNFKLLRVV | | AQSKNFHLRPRDLISNINVIVLEL | GQPREPQVYT1PPCRDELTKNQVSLWCLVKGFYPSDIAVE |
| | NG]-hIL2 | | KGSETTFMCEYADETATIVEFLNR | WESNGQPENNYKTTPPV1DSDGSFFLYSKLTVDKSRWQQG |
| | (F42S, | | WITFAQSIISTLT(SEQ ID | NVFSCSVMHEALHNHYTQKSLSLSPG |
| | E62S, C1213A) | | NO: 74) | (SEQ ID NO: 360) |
| DNA477 | Knob: | | | TIKPCPPCKCPAPNAAGGPSVFIFPPKIKDVLMISLSPIV |
| | mFcIgG2a | | | TCVVVDVSEDDPDVQISWEFNNVEVHTAQTQTHREDYNST |
| | (LALAPG)- | | | LRVVSALPIQHQDWMSGKEFKCKVNNKDLGAPIERTISKP |
| | hIL2(R38A, | | | KGSVRAPQVYVLPPCEEEMTKKQVTLWCMVTDFMPEDIYV |
| | F42A, | | | EWTNNGKTELNYKNTEPVLDSDGSYFMYSKLRVEKKNWVE |
| | Y45A, E62A, | | | RNSYSCSVVHEGLHNHHTTKSFSRTPGGGSSPPGGGSSGG |
| | C125A) | | | GSGPAPTSSSTKKTQLQLEHLLLDLQMILNGINNYKNPKL |
| | | | | TAMLTAKEAMPKKATELKHLQCLEEALKPLEEVLNLAQSK |
| | | | | NFHLRPRDLISNINVIVLELKGSETTFMCEYADETATIVE |
| | | | | FLNRWITFAQSIISTLT |
| | | | | (SEQ ID NO: 361) |
| DNA478 | Knob: | SGP | APTSSSTKKTQL | TIKPCPPCKCPAPNAAGGPSVFIFPPKIKDVLMISLSP |
| | mFcIgG2a | (SEQ ID | QLEHLLLDLQMI | IVTCVVVDVSEDDPDVQISWFVNNVEVHTAQTQTHRED |
| | (LALAPG)- | NO: 29) | LNGiNNYKNPKL | YNSTLRVVSALPIQHQDWMSGKEFKCKVNNKDLGAPIE |
| | [VPLSLY]- | | TAMLTAKFAMP | RTISKPKGSVRAPQVYVLPPCEEEMTKKQVTLWCMVTD |
| | hIL2 | | KKATELKHLQCL | FMPEDIYVEWTNNGKTELNYKNTEPVLDSDGSYFMYSK |
| | (R38A, | | EEALKPLEEVLN | LRVEKKNWVERNSYSCSLLHEGLHNHHTTKSFSRTPGG |
| | F42A, | | LAQSKNFHLRPR | SPGVPLSLYSGPAPTSSSTKKTQLQLEHLLLDLQMIL |
| | Y45A, | | DLISNINVIVLEL | NGINNYKNPKLTAMLTAKFAMPKKATELKHLQCLEEA |
| | E62A, | | KGSETTFMCEY | LKPLEEVLNLAQSKNFHLRPRDLISNINVIVLELKGS |
| | C125A) | | ADETATIVEFLN | ETTFMCEYADETATIVEFLNRWITFAQSIISTLT |
| | | | RWITFAQSIISTL | (SRQ ID NO: 362) |
| | | | T | |
| | | | (SEQ ID | |
| | | | NO: 3) | |
| DNA479 | Hole: | | | TIKPCPPCKCPAPNAAGGPSVFIFPPKIKDVLMISLSPIV |
| | mFcIgG2a | | | TCVVVDVSEDDPDVQISWFVNNVEVHTAQTQTHREDYNST |
| | (LALAPG) | | | LRVVSALPIQHQDWMSGKEFKCKVNNKDLGAPIERTISKP |
| | | | | KGSVRAPQVCVLPPPEEEMTKKQVTLSCAVTDFMPEDIYV |
| | | | | EWTNNGKTELNYKNTEPVLDSDGSYFMVSKLRVEKKNWVE |
| | | | | RNSYSCVVHEGLHNHHTTKSFSRTPG |
| | | | | (SEQ ID NO: 281) |
| DNA480 | Hole: | | | TIKPCPPCKCPAPNAAGGPSVFIFPPKIKDV |
| | mFcIgG2a | | | LMISLSPIVTCVVVDVSEDDPDVQISWFVN |
| | (LALAPG)- | | | NVEVHTAQTQTHREDYNSTLRVVSALPIQH |
| | hCD122 | | | QDWMSGKEFKCKVNNKDLGAPIERTISKPK |
| | | | | GSVRAPQVCVLPPPEEEMTKKQVTLSCAVT |
| | | | | DFMPEDIYVEWTNNGCTELNYKNTEPVLDS |
| | | | | DGSYFMVSKLRVEKKNWVERNSYSCSWHEG |
| | | | | LKNHHTTKSFSRTPGPGSGSAVNGTSQFTC |
| | | | | FYNSRANISCVVVSQDGALQDTSCQVHAWP |
| | | | | DRRRWNQTCELLPVSQASWACNLILGAPDS |
| | | | | QKLTTVDIVTLRVLCREGVRWRVMAIQDFK |
| | | | | PFENLRLMAPISLQWHVETHRCNISWEISQ |
| | | | | ASHYFERHLEFEARTLSPGHTWEEAPLLTL |
| | | | | KQKQEWICLETLTPDTQYEFQVRVKPLQGE |
| | | | | FTTWSPVVSQPLAFRTKPAALGKD |
| | | | | (SEQ ID NO: 363) |
| DNA516 | F8ScFvVersion1- | PGSGS | AVNGTSQFTCFYNSRANISCVW | EVQLLESGGGLVQPGGSLRISCAASGFTFSL |
| | Hole: | (SEQ | SQDGALQDTSCQVHAWPDRRR | FTMSVVVRQAPGKGLEVVVSAISGSGGSTY |
| | hFc(N297A)- | ID | WNQTCELLPVSQASWACNLILG | YADSVKGRFTISRDNSKNTYLQMNSLRAED |
| | hCD122 | NO: | APDSQKLTTVDIVTLRVLCREGVR | TAVYYCAKSTHLYLFDYWGQGTLVTVSSGG |
| | | 14) | WRVMAIQDFKPFENLRLMAPIS | GGSGGGGEIGGGGSEIVLTQSPGTLSISPG |
| | | | LQVVHVETHRCNISWEISQASHY | ERATLSCRASQSVSMPFLAWYQQKPGQAPR |
| | | | FERHLEFEARTLSPGHTWEEAPL | LLIYGASSRATGIPDRESGSGSGTDFTLTI |
| | | | LTLKQKQEWICLETLTPDTQYEFQ | SRLEPEDFAVYYCQQMRGRPPTFGQGTKVE |
| | | | VRVKPLQGEFTTWSPWSQPLAFR | IKGGSDKTHTCPPCPAPELLGGPSVFLFPP |
| | | | TKPAALGKD | KPKDTLMISRTPEVTCVVVDVSHEDPEVKF |
| | | | (SEQ ID NO: 4) | NWYVDGVEVHNAKTKPREEQYASTYRVVSV |
| | | | | LTVLHQDWLNGKEYKCKVSNKALPAPIEKT |
| | | | | ISKAKGQPREPQVCTLPPSRDELTKNQVSL |
| | | | | SCAVKGFYPSDIAVEWESNGQPENNYKTTP |
| | | | | PVLDSDGSFFLVSKLTVDKSRWQQGNVFSC |
| | | | | SVMHEALHNHYTQKSLSLSPGPGSGSAVNG |
| | | | | TSQFTCFYNSRANISCVWSQDGALQDTSCQ |
| | | | | VHAWPDRRRWNQTCELLPVSQASWACNLIL |
| | | | | GAPDSQKLTTVDIVTLRVLCREGVRWRVMA |
| | | | | IQDFKPFENLRLMAPISLQVVHVETHRCNI |
| | | | | SWEISQASHYFERHLEFEARTLSPGHTWEE |
| | | | | APLLTLKQKQEWICLETLTPDTQYEFQVRV |
| | | | | KPLQGEFTTWSPWSQPLAFRTKPAALGKD |
| | | | | (SEQ ID NO: 364) |
| DNA520 | Hole: | | | TIKPCPPCKCPAPNAAGGPSVFIFPPKIKDV |
| | mFcIgG2a | | | LMLSLSPTVTCVVVDVSEDDPDVQISWFVN |
| | (LALAP | | | NVEVHTAQTQTHREDYNSTLRVVSALPIQH |
| | G)- | | | QDVVMSGKEFKCKVNNKDLGAPIERTISKP |
| | No | | | KGSVRAPQVCVLPPPEEEMTKKQVTLSCAV |
| | AnnototationFound | | | TDFMPEDIYVEWTNNGKTELNYKMTEPVLD |
| | | | | SDGSYFMVSKLRVEKKNWVERNSYSCSVVH |
| | | | | EGLHNHHTTKSFSRTPGHHHHHHHH |
| | | | | (SEQ ID NO: 365) |
| DNA521 | Hole: | GHHHH | | TIKPCPPCKCPAPNAAGGPSVFIFPPKIKDV |
| | hFcIgG2a | HHHH | | LMISISPIVTCVVVDVSEDQPDVQISWFVN |
| | (LALAP | (SEQ | | NVEVHTAQTQTHREDYNSTLRWSALPIQHQ |
| | G)- | ID | | PWMSGKEFKCKVNNKDLGAPIERTISKPKG |
| | No | NO: | | SVRAPQVCVLPPPEEEMTKKQVTLSCAVTD |
| | AnnototationFound | 334) | | FMPEDIYVEWTNNGKTELNYKNTEPVLDSD |
| | | | | GSYFMVSKLRVEKKNWVERNSYSCSVVHEG |
| | | | | LHNHHTTKSFSRTPGPGSGSAVNGTSQFTC |
| | | | | FYNSRANISCVWSQDGALQDTSCQVHAWPD |
| | | | | RRRWNQTCELLPVSQASVVACNLILGAPDS |
| | | | | QKITTVDIVTLRVICREGVRWRVMAIQDFK |
| | | | | PFENLRLMAPISLQWHVETHRCNISW |
| | | | | EISQASHYFERHLEFEARTLSPGHTWEEAP |
| | | | | ILTLKQKQEWICLETLTPDTQYEFQVRVKP |
| | | | | LQGEFTTWSPWSQPLAFRTKPAALGKDGHH |
| | | | | HHHHHH |
| | | | | (SEQ ID NO: 366) |
| DNA522 | Hole: | GHHHH | | TIKPCPPCKCPAPNAAGGP5VFIFPPKIKDV |
| | mFcIgG2a | HHHH | | LMISLSPIVTCVVVDVSEDDPDVQISWFVN |
| | (LALAP | (SEQ | | NVEVHTAQTQTHREDYNSTLRWSALPIQHQ |
| | G)- | ID | | DWMSGKEFKCKVNNKDLGAPIERTISKPKG |
| | No | NO: | | SVRAPQVCVLPPPEEEMTKKQVTLSCAVTD |
| | AnnototationFound | 334) | | FMPEDIYVEWTNNGKTELNYKNTEPVLDSD |
| | | | | GSYFMVSKLRVEKKNWVERNSYSCSVVHEG |
| | | | | LHNHHTTKSFSRTPGPGSGSAVKNCSHLEC |
| | | | | FYNSRANVSCMWSHEEALNVTTCHVHAKSN |
| | | | | LRHWNKTCELTLVRQASWACMLILGSFPES |
| | | | | QSLTSVDLLDINVVCWEEKGWRRVKTCDFH |
| | | | | PFDNLRLVAPHSLQVLHIDTQRCNISWKVS |
| | | | | QVSHYIEPYLEFEARRRLLGHSWEDASVLS |
| | | | | LKQRQQWLFLEMLIPSTSYEVQVRVKAQRN |
| | | | | NTGTWSPWSQPLTFRTRPADPMKEGHHHHH |
| | | | | HHH (SEQ ID NO: 367) |
| DNA528 | Hole: | | | DKTHTCPPCPAPELLGGPSVFLFPPKPKDT |
| | hFc(N297A)- | | | LMISRTPEVTCVVVDVSHEDPEVKFNWYVD |
| | hCD122 | | | GVEVHNAKTKPREEQYASTYRVVSVLTVLH |
| | (C168S) | | | QDWLNGKEYKCKVSNKALPAPIEKTISKAK |
| | | | | GQPREPQVCTLPPSRDELTKNQVSLSCAVK |
| | | | | GFYPSDIAVEWESNGQPENNYKTTPPVLDS |
| | | | | DGSFFLV |
| | | | | SKLTVDKSRWQQGNVFSCSVMHEALHNHYT |
| | | | | QKSLSLSPGPGSGSAVNGTSQFTCFYNSRA |
| | | | | NISCVWSQDGALQDTSCQVHAWPDRRRWNQ |
| | | | | TCELLPVSQASWACNLILGAPDSQKLTTVD |
| | | | | IVTLRVLCREGVRWRVMAIQDFKPFENLRL |
| | | | | MAPISLQWHVETHRCNISWEISQASHYFER |
| | | | | HLEFEARTLSPGHTWEEAPLLTLKQKQEWI |
| | | | | SLFIITPDTQYEFQVRVKPLQGEFTTWSPW |
| | | | | SQPLAFRTKPAALGKD |
| | | | | (SEQ ID NO: 368) |
| DNA530 | Knob: | | | VRSGCKPCICTVPEVSSVRFPPKPKDVLTI |
| | mFcIgG1 | | | TLTPKVTCVVVAISKDDPEVQFSWFVDDVE |
| | (DAPG)- | | | VHTAQTQPREEQFNSTFRSVSELPIMHQDW |
| | hIL2 | | | LNGKEFKCRVNSAAFGAPIEKTISKTKGRP |
| | (R38A, | | | KAPQVYTIPPPKEQMAKDKVSLTCMITDFF |
| | F42A, | | | PEDITVEWQWNGQPAENYDNTQPIMDTDGS |
| | Y45A, | | | YFVYSDLNVQKSNWEAGNTFTCSVLHEGLH |
| | E62A, | | | NHHTEKSLSHSPGGGSSPPGGGSSGGGSGP |
| | C125S) | | | APTSSSTKKTQLQLEHLLLDLQMILNGINN |
| | | | | YKNPKLTAMLTAKFAMPKKATELKHLQCLE |
| | | | | EALKPLEEVLNLAQSKNFHLRPRDLISNIN |
| | | | | VIVLELKGSETTFMCEYADETATIVEFLNR |
| | | | | WITFAQSSISTLT (SEQ ID NO: 369) |
| DNA531 | Knob: | SGP | APTSSSTKKTQL | VRSGCKPCICTVPEVSSVFIFPPKPKDVLT |
| | mFcIgG1 | (SEQ | QLEHLLLDLQMI | ITLTPKVTCVVVAISKDOPEVQFSWFVDDV |
| | (DAPG)- | ID | LNGINNYKNPKL | EVHTAQTQPREEQFNSTFRSVSELPIMHQD |
| | [VPLSLY] | NO: | TAMLTAKFAMP | WLNGKEFKCRVNSMFGAPIEKTISKTKGRP |
| | hIL2 | 29) | KKATELKHLQCL | KAPQVYTIPPPKEQMAKDKVSLTCMITDFF |
| | (R38A, | | EEALKPLEEVLN | PEDITVEWQWNGQPAENYDNTQPIMDTDGS |
| | F42A, | | LAQSKNFHLRPR | YFVYSDLNVQKSNWEAGNTFTCSVLHEGLH |
| | Y45A, | | DLISNINVIVL | NHHTEKSLSHSPGGSPGVPLSLYSGPAPTS |
| | E62A, | | ELKGSETTFMC | SSTKKTQLQLEHLILDIQMILNGINNYKNP |
| | C125S) | | EYADETATIVEF | KLTAMLTAKFAMPKKATELKHLQCLEEALK |
| | | | LNRWITFAQSII | PLEEVLIMLAQSKNFHLRPRDLISNIVIVL |
| | | | STLT | ELKGSETTFMCEYADETATIVEFLNRWSTF |
| | | | (SEQ ID | AQSIISTLT (SEQ ID NO: 370) |
| | | | NO: 3) | |
| DNA532 | Hole: | | | VRSGCKPCICTVPEVSSVFIFPPKPKDVLH |
| | mFcIgG1 | | | TLTPKVTCVVVAISKDDPEVQFSWFVDDVE |
| | (DAPG) | | | VHTAQTQPREEQFNSTFRSVSELPIMHQDW |
| | | | | LNGKEFKCRVNSAAFGAPIEKTISKTKGRP |
| | | | | KAPQVYTIPPPKKQMAKDKVSLTCMITDFF |
| | | | | PEDITVEWQWNGQPAENYKNTQPIMKTDGS |
| | | | | YFWSKLNVQKSNWEAGNTFTCSVLHEGLHN |
| | | | | HHTEKSLSHSPG |
| | | | | (SEQ ID NO: 284) |
| DNA533 | Hole: | | | VRSGCKPGCTVPGVSSVFIFPPKPKDVLTI |
| | mFcIgG1 | | | TLTPKVTCVVVAISKDDPEVQFSWFVDDVE |
| | (DAP | | | VHTAQTQPREEQFNSTFRSVSELPIMHQDW |
| | G)- | | | LNGKEFKCRVNSAAFGAPIEKTISKTKGRP |
| | hCD122 | | | KAPQVYTIPPPKKQPMAKDKVSLTCMITDF |
| | | | | FPEDITVEWQWNGQPAENYKNTQPIMKTDG |
| | | | | SYFVYSKLNVQKSNWEAGNTFTCSVLHEGL |
| | | | | HNHHTEKSLSHSPGPGSGSAVNGTSQFTCF |
| | | | | YNSRANISCVWSQPGALQPTSCQVHAWPDR |
| | | | | RRWNQTCELLPVSQASWACNLILGAPDSQK |
| | | | | LTTVDIVTLRVLCREGVRWRVMAIQDFKPF |
| | | | | ENLRLMAPISLQVVHVETHRCNISWEISQAS |
| | | | | HYFERHLEFEARTLSPGHTWEEAPLLTLKQ |
| | | | | KQEWICLETLTPDTQYEFQVRVKPLQGEFT |
| | | | | TTWSPWSQPLAFRTKPAALGKD |
| | | | | (SEQ ID NO: 371) |
| DNA534 | Hole: | | | VRSGCKPCICTVPEVSSVFIFPPKPKDVLT |
| | mFcIgG1 | | | ITLTPKVTCVWAISKDDPEVQFSWFV |
| | (DAP | | | DDVEVHTAQTQPREEQFNSTFRSVSELPIM |
| | G)- | | | HQDWLNGKEFKCRVNSAAFGAPIE |
| | mCD122 | | | KTISKTKGRPKAPQVYTIPPPKKQMAKDKV |
| | | | | SLTCMITDFFPEDITVEWQWNGQP |
| | | | | AENYKNTQPIMKTDGSYFVYSKLNVQKSNW |
| | | | | EAGNTFTCSVLHEGLHNHHTEKSL |
| | | | | SHSPGPGSGSAVKNCSHLECFYNSRANVSC |
| | | | | MWSHEEALNVTTCHVHAKSNLRH |
| | | | | WNKTCELTLVRQASWACNLILGSFPESQSL |
| | | | | TSVDLLOINWCWEEKGWRRVKTC |
| | | | | DFHPFDNLRLVAPHSLQVLHIDTQRCNISW |
| | | | | KVSQVSHYIEPYLEFEARRRLLGHS |
| | | | | WEDASVLSLKQRQQVVLFLEMLIPSTSYEV |
| | | | | QVRVKAQRNNTGTWSPWSQPLTFR |
| | | | | TRPADPMKE (SEQ ID NO: 372) |
| DNA542 | Knob: | | | DKTHTCPPCPAPELLGGPSVFLFPPKPKDTL |
| | hFc(N297A)- | | | MISRTPEVTCVVVDVSHEDPEVKFNWYVDG |
| | hIL2(R38A, | | | VEVHNAKTKPREEQYASTYRVVSVLTVLHQ |
| | F42A; | | | DWLNGKEYKCKVSNKALPAPIEKTISKAKG |
| | Y45A, | | | QPREPQVYTLPPCRDELTKNQVSLWCLVKG |
| | E62A, | | | FYPSDIAVEWESNGQPENNYKTTPPVLDSD |
| | C125A) | | | GSFFLYSKLTVDKSRWQQGNVFSCSVMHEA |
| | | | | LHNHYTQKSLSLSPGGSSGLLSGRSDQPSG |
| | | | | PAPTSSSTKKTQLQLEHLLLDLQMILNGIN |
| | | | | NYKNPKLTAMLTAKFAMPKKATELKHLQCL |
| | | | | EEALKPLEEVLNLAQSKNFHLRPRDLISNI |
| | | | | NVIVLELKGSETTFMCEYADETATIVEFLN |
| | | | | RWITFAQSIISTLT |
| | | | | (SEQ ID NO: 373) |
| DNA543 | Hole: | GSGGG | AVNGTSQFTCF | DKTHTCPPCPAPELLGGPSVFLFPPKPKDTL |
| | hFc(N297A)- | (SEQ | YNSRANISCVW | MISRTPEVTCVVVDVSHEDPEVKFNWWDGV |
| | [VPLSLY]- | ID | SQDGALQDTSC | EVHNAKTKPREEQYASTYRVVSVLWLHQDW |
| | hCD122 | NO: | QVHAWPDRRR | LNGKEYKCKVSNKALPAPIEKTISKAKGQP |
| | | 31) | WNQTCELLPVS | REPQVCTLPPSRDELTKNQVSLSCAVKGFY |
| | | | QASWACNLILG | PSDIAVEWESNGQPENNYKTTPPVLDSDGS |
| | | | APDSQKLTTVDI | FFLVSKLTVDKSRWQQGNVFSCSVMHEALH |
| | | | VTLRVLCREGVR | NHYTQKSLSLSPGGPPSGSSPGVPLSLYGS |
| | | | WRVMAIQDFK | QGGAVNGTSQFTCFYNSRANISCVWSQDGA |
| | | | PFENLRLMAPIS | LQDTSCQVHAWPDRRRWNQTCELLPVSQAS |
| | | | LQVVHVETHRC | WACNLILGAPDSQKLTTVDIVTLRVLCREG |
| | | | NISWEISQASHY | VRWRVMAIQDFKPFENLRLMAPISLQVVHVE |
| | | | FERHLEFEARTL | THRCNISWEISQASHYFERHLEFEARTISP |
| | | | SPGHTWEEAPL | GHTWEEAPLLLIKQKQEWICLETITPDTQYE |
| | | | LTLKQKQEWICL | FQVRVKPLQGEFTTWSPWSQPLAFRTKPAA |
| | | | ETLTPDTQYEFQ | LGKD (SEQ ID NO: 42) |
| | | | VRVKPLQGEFTT | |
| | | | WSPWSQPLAFR | |
| | | | TKPAALGKD | |
| | | | (SEQ ID NO: 4) | |
| DNA544 | Knob: | SGP | APTSSSTKKTQL | DKTHTCPPCPAPELLGGPSVFLFPPKPKDT |
| | hFc(N297A)- | (SEQ | QLEHLLLDLQMI | LMISRTPEVTCVVVDVSHEDPEVKFNWYVD |
| | [VPLSLY]- | ID | LNGINNYKNPKL | GVEVHNAHTKPREEQYASTYRVV5VLTVLH |
| | hIL2 | NO: | TAMLTAKFAMP | QDWLNGKEYKCKVSNKALPAPIEKTISKAK |
| | (R38A, | 29) | KKATELKHLQCL | GQPREPQVYTLPPCRDELTKNQVSLWCLVK |
| | F42A, | | EEALKPLEEVLN | GFYPSDIAVEWESNGQPENNYKTTPPVLDS |
| | Y45A, | | LAQSKNFHFDP | DGSFFLYSKLTVOKSRWQQGNVFSCSVMHE |
| | E62A, | | RDWSNIMVFVL | ALHNHYTQKSLSISPGGSPGVPLSLYSGPA |
| | L80F, | | SIKGSETTFMCE | PTSSSTKKTQLQLEHLLLDLQMIING1NNY |
| | R81D, | | YADETATIVEFL | KNPKLTAMLTAKFAMPKKATELKHLQCLEE |
| | L85V, | | NRWITFAQSII | ALKPLEEVLNLAQSKNFHFDPRDWSNINVF |
| | I36V, | | STIT | VLELKGSETTFMCEYADETATIVEFLNRWI |
| | I92F, | | (SEQ ID | TFAQSIISTLT |
| | C125A) | | NO: 328) | (SEQ ID NO: 375) |
| DNA545 | Knob: | | | DKTHTCPPCPAPELLGGPSVFLFPPKPKDTL |
| | hFc | | | MISRTPEVTCVVVDVSHEDPEVKFNWYVDG |
| | (N297A)- | | | VEVHNAKTKPREEQYASTYRVVSVLTVLHQ |
| | hIL2 | | | PWLNGKEYKCKVSNKALPAPIEKHSKAKGQ |
| | (R38A, | | | PRGPQVYTIPPCRDELTKNQVSLWCIVKGF |
| | F42A, | | | YPSDIAVEWESNGQPENNYKTTPPVLDSDG |
| | Y45A, | | | SFFLYSKLTVDKSRWQQGNVFSCSVMHEAL |
| | E62A, | | | HNHYTQKSLSLSPGGISSGLLSGRSSGPAP |
| | C125A) | | | TSSSTKKTQLQLEHLLLDLQMILNGINNYK |
| | | | | NPKLTAMLTAKFAMPKKATELKHLQCLEEA |
| | | | | LKPLEEVLNLAQSKNFHLRPRDLISNINVI |
| | | | | VLELKGSETTFMCEYADETATIVEFLNRWI |
| | | | | TFAQSIISTLT(SEQ ID NO: 376) |
| DNA546 | Knob: | | | DKTHTCPPCPAPELLGGPSVFLFPPKPKDT |
| | hFc | | | LMISRTPEVTCVVVDVSHEDPEVKFNWYV |
| | (N297A)- | | | DGVEVHNAKTKPREEQYASTYRWSVLTVLH |
| | hIL2 | | | QDWINGKEYKCKVSNKALPAPIEKTISKAK |
| | (R38A, | | | GQPREPQVYTLPPCRDELTKNQVSLWCLVK |
| | F42A, | | | GFYPSDIAVEWESNGQPENNYKTTPPVLDS |
| | Y45A, | | | DGSFFLYSKLTVQKSRWQQGNVFSCSVMHE |
| | E62A, | | | ALHNHYTQKSLSLSPGGGSSPPGGGSSGG |
| | L30F, | | | GSGPAPTSSSTKKTQLQLEHLLLDLQMILN |
| | R81D, | | | GINNYKNPKLTAMLTAKFAMPKKATELKH |
| | I85V, | | | LQCLEEALKPLEEVLNLAQSKNFHFDPRDV |
| | I86V, | | | VSNINVFVLELKGSETTFMCEYADETATIV |
| | I32F, C125A) | | | EFLNRWITFAQSHSTLT |
| | | | | (SEQ ID NO: 377) |
| DNA547 | Hole: | AVNGTSQFTCFYNSRANISCVW | | EPKSSDKTHTCPPCPAPELLGGPSV |
| | hFcIgG1 | SQDGALQDTSCQVHAWPDRRR | | FLFPPKPKDTLMISRTPEVTCVVVD |
| | (N29 | WNQTCELLPVSQASWACNLILG | | VSHEDPEVKFNWYVDGVEVHNAKTK |
| | 7A + EPKSS)- | APDSQKLTTVDIVTLRVLCREGVR | | PREEQYASTYRVVSVLTVLHQDWLN |
| | Hole: | WRVMAIQDFKPFENLRLMAPIS | | GKEYKCKVSNKALPAPIEKTISKAK |
| | hFc | LQVVHVETHRCNISWEISQASHY | | GQPREPQVCLPPSRDELTKNQVSLS |
| | (N297A)- | FERHLEFEARTLSPGHTWEEAPL | | CAVKGFYPSDIAVEWESNGQPENNY |
| | hCD122 | LTLKQKQEWICLETLTPDTQYEFQ | | KTTPPVLDSDGSFFLVSKLTVCKSR |
| | | VRVKPLQGEFTTWSPWSQPLAFR | | WQQGNVFSCSVMHEALHNHYTQKSL |
| | | TKPAALGKD | | SLSPGPGSGSAVNGTSQFTCFYMSR |
| | | (SEQ ID NO: 4) | | ANISCVWSQDGALQDTSCQVHAWPD |
| | | | | RRRWNQTCELLPVSQASWACNLILG |
| | | | | APDSQKLTTVDIVTLRVLCREGVRW |
| | | | | RVMAIQDFKPFENLRLMAPISLQWH |
| | | | | VETHRCNISWEISQASHYFERHLEF |
| | | | | EARTLSPGHTWEEAPLLTLKQKQEW |
| | | | | ICLETLTPDTQYEFQVRVKPLQGEF |
| | | | | FTWSPWSQPLAFRTKPAALGKD |
| | | | | (SEQ ID NO: 378) |
| DNA548 | Hole: | AVNGTSQFTCFYNSRANISCVW | | AKTDKTHTCPPCPAPELLGGPSVFL |
| | hFcIgG1 | SQDGALQDTSCQVHAWPDRRR | | FPPKPKDTLMISRTPEVTCVVVDVS |
| | (N29 | WNQTCELLPVSQASWACNLILG | | HEDPEVKFNWYVDGVEVHNAKTKPR |
| | 7A + AK7)- | APDSQKLTTVDIVTLRVLCREGVR | | EEQYASTYRVVSVLTVLHQDWLNGK |
| | Hole: | WRVMAIQDFKPFENLRLMAPIS | | EYKCKVSNKALPAPIEKTISKAKGQ |
| | hFc | LQVVHVETHRCNISWEISQASHY | | PREPQVCTLPPSRDELTKNQVSLSC |
| | (N297A)- | FERHLEFEARTLSPGHTWEEAPL | | AVKGFYPSDIAVEWESNGQPENNYK |
| | hCD122 | LTLKQKQEWICLETLTPDTQYEFQ | | TTPPVLDSDGSFFLVSKLTVDKSRW |
| | | VRVKPLQGEFTTWSPWSQPLAFR | | QQGNVFSCSVMHEALHNHYTQKSLS |
| | | TKPAALGKD | | LSPGPGSGSAVNGTSQFTCFYNSRA |
| | | (SEQ ID NO: 4) | | NISCVWSQDGALQDTSCQVHAWPDR |
| | | | | RRWNQTCELLPVSQASWACNLILGA |
| | | | | PDSQKLTTVDIVTLRVLCREGVRWR |
| | | | | VMAIQDFKPFENLRLMAPISLQVVH |
| | | | | VETHRCNISWEISQASHYFERHLEF |
| | | | | EARTLSPGHTWEEAPLLTLKQKQEW |
| | | | | ICLETLTPDTQYEFQVRVKPLQGEF |
| | | | | TTWSPWSQPLAFRTKPAALGKD |
| | | | | (SEQ ID NO: 379) |
| DNA549 | Knob: | PGSGS | AVNGTSQFTCFYNSRANISCVW | AKTEPKSSDKTHTCPPCPAPELLGG |
| | hFcIgG1 | (SEQ | SQDGALQDTSCQVHAWPDRRR | PSVFLFPPKPKDTLMISRTPEVTCV |
| | (N29 | ID | WNQTCELLPVSQASWACNLILG | VVDVSHEDPEVKFNWYVDGVEVHNA |
| | 7A + | NO: | APDSQKLTTVDIVTLRVLCREGVR | KTKPREEQYASTYRVVSVLTVLHQD |
| | AKTEPKSS)- | 14) | WRVMAIQDFKPFENLRLMAPIS | WLNGKEYKCKVSNKALPAPIEKTIS |
| | hCD122 | | LQVVHVETHRCNISWEISQASHY | KAKGQPREPQVCTLPPSRDEITKNQ |
| | | | FERHLEFEARTLSPGHTWEEAPL | VSLSCAVKGFYPSDIAVEWESNGQP |
| | | | LTLKQKQEWICLETLTPDTQYEFQ | ENNYKTTPPVLDSDGSFFLVSKLTV |
| | | | VRVKPLQGEFTTWSPWSQPLAFR | DKSRWQQGNVFSCSVMHEALHNHYT |
| | | | TKPAALGKD | QKSLSLSPGPGSGSAVNGTSQFTCF |
| | | | (SEQ ID NO: 4) | YNSRANISCVWSQDGALQPTSCQVH |
| | | | | AWPDRRRWNQTCELLPVSQASWACN |
| | | | | LILGAPDSQKLTTVDIVTLRVLCRE |
| | | | | GVRWRVMAIQDFKPFENLRLMAPIS |
| | | | | LQWHVETHRCNISWEISQASHYFER |
| | | | | HLEFEARTLSPGHTWEEAPLLTLKQ |
| | | | | KQEWICLETLTPDTQYEFQVRVKPL |
| | | | | QGEFTTWSPWSQPLAFRTKPAALGK |
| | | | | D (SEQ ID NO: 380) |
| DNA550 | Knob: | SGP | APTSSSTKKTQL | EPKSSDKTHTCPPCPAPELLGGPVF |
| | hFcIgG1 | (SEQ | QLEHLLLDLQMI | LFPPKPKDTLMISRTPEVTCVVVDV |
| | (N29 | ID | LNGINNYKNPKL | SHEDPEVKFNWY |
| | 7A + EPKSS)- | NO: 29) | TAMLTAKFAMP | VDGVEVHNAKTKPREEQYASTFYRV |
| | hIL2 | | KKATELKHLQCL | VSVLTVLHQDWLNGKEYKCKVSNKA |
| | (R38A, | | EEALKPLEEVLN | LPAPIEKTISKAKGQPREPQVYTLP |
| | F42A, | | LAQSKNFHLRPR | PCRDELTKNQVSLWCLVKGFYPSDI |
| | Y45A, | | DLISNINVIVLEL | AVEWESNGQPENNYKTTPPVLDSDG |
| | E62A, | | KGSETTFMCEY | SFFLYSKLTVDKSRWQQGNVFSCSV |
| | C125A) | | ADETATIVEFLN | MHEALHNHYTQKSLSLSPGGSPGVP |
| | | | RWITFAQSIISTL | LSLYSGPAPTSSSTKKTQLQLEHLL |
| | | | T | LDLQMILNGINNYKNPKLTAMLTAK |
| | | | (SEQ ID | FAMPKKATELKHLQCLEEALKPLEE |
| | | | NO: 3) | VLNLAQSKNFHLRPRDLISNINVIV |
| | | | | LELKGSETTFMCEYADETATIVEFL |
| | | | | NRWITFAQSIISTLT |
| | | | | (SEQ ID NO: 381) |
| DNA551 | Knob: | SGP | APTSSSTKKTQL | AKTDKTHTCPPCPAPELLGGPSVFL |
| | hFcIgG1 | (SEQ | QLEHLLLDLQMI | FPPKPKDTLMISRTPEVTCVVVDVS |
| | (N29 | ID | LNGINNYKNPKL | HEDPEVKFNWYVDGVEVHNAKTRPR |
| | 7A + | NO: 29) | TAMLTAKFAMP | EEQYASTYRVVSVLTVLHQDWLNGK |
| | AKT)- | | KKATELKHLQCL | EVKCKVSNKALPAPIEKTISKAKGQ |
| | [VPLSLY] | | EEALKPLEEVLN | PREPQVYTLPPCRDELTKNQVSLWC |
| | hIL2 | | LAQSKNFHLRPR | LVKGFYPSDIAVEWESNGQPENNYK |
| | (R38A, | | DLISNINVIVLEL | TTPPVLDSDQSFFLYSKLTVDKSRW |
| | F42A, | | KGSETTFMCEY | QQGIWFSCSVMHEALHNHYTQKSLS |
| | Y45A, | | ADETATIVEFLN | LSPGGSPGVPLSLYSGPAPTSSSTK |
| | E62A, | | RWITFAQSIISTL | KTQLQLEHLLLDLQMILNGINNYKN |
| | C125A) | | T | PKLTAMLTAKFAMPKKATELKHLQC |
| | | | (SEQ ID | LEEALKPLEEVLNLAQSKNFHLRPR |
| | | | NO: 3) | DLISNINVIVLELKGSETTFMCEYA |
| | | | | DETATIVEFLNRWITFAQSIISTLT |
| | | | | (SEQ ID NO: 382) |
| DNA552 | Knob: | SGP | APTSSSTKKTQL | AICTEPKSSDKTHTCPPCPAPELLG |
| | hFcIgG1 | (SEQ | QLEHLLLDLQMI | GPSVFLFPPKPKDTLMISRTPEVTC |
| | (N29 | ID | LNGINNYKNPKL | VVVDVSHEDPEVKFNWYVDGVEVHN |
| | 7A + | NO: 29) | TAMLTAKFAMP | AKTKPREEQYASTYRVVSVLTVLHQ |
| | AKTEPKSS)- | | KKATELKHLQCL | DWLNGKEYKCKVSNKALPAPIEKLIS |
| | [VPLSLY] | | EEALKPLEEVLN | KAKGQPREPQVYTLPPCRDELTKNQ |
| | hIL2 | | LAQSKNFHLRPR | VSLWCLVKGFYPSDIAVEWESNGQP |
| | (E15R, | | DLISNINVIVLEL | ENNYKTTPPVLDSDGSFFLYSKLTV |
| | L18C, | | KGSETTFMCEY | DKSRWQQSNVFSCSVMHEALHNHYT |
| | D20R, | | ADETATIVEFLN | QKSLSLSPGGSPGVPLSLYSGPAPT |
| | R38A, | | RWITFAQSIISTL | SSSTKKTQLQLEHLLLDLQMILNGI |
| | F42A, | | T | NNYKNPKLTAMLTAKFAMPKKATEL |
| | Y45A, | | (SEQ ID | KHLQCLEEALKPLEEVLNLAQSKNF |
| | E62A, | | NO: 3) | HLRPRDLISNINVIVLELKGSETTF |
| | N88L) | | | MCEYADETATIVEFLNRWITFAQSI |
| | | | | STLT(SEQ ID NO: 383) |
| DNA553 | Hole: | SGGG | AVNGTSQFTCFYNSRANISCVW | DKTHTCPPCPAPELLGGPSVFLFPPKPKDTL |
| | hFc(N297A)- | (SEQ | SQDGALQDTSCQVHAWPDRRR | MISRTPEVTCVVVLWSHEDPEVKFNWYVDG |
| | [DSGGFMLT]- | ID | WNQTCELLPVSQASWACNLILG | VEVHNAKTKPREEQYASTYRVVSVLTVLHQ |
| | hCD122 | NO: 30) | APDSQKLTTVDIVTLRVLCREGVR | DWLNGKEYKCKVSNKALPAPIEKTISKAKG |
| | | | WRVMAIQDFKPFENLRLMAPIS | QPREPQVCTLPPSRDELTKNQVSLSCAVKG |
| | | | LQVVHVETHRCNISWEISQASHY | FYPSDIAVEWESNGQPENNYKTTPPVLDSD |
| | | | FERHLEFEARTLSPGHTWEEAPL | GSFFLVSKLTVDKSRWQQGNVFSCSVMHEA |
| | | | LTLKQKQEWICLETLTPDTQYEFQ | LHNHYTQKSLSLSPGGPPSGSSPGDSGGFM |
| | | | VRVKPLQGEFTTWSPWSQPLAFR | LTSGGGAVNGTSQFTCFYNSRANISCVWSQ |
| | | | TKPAALGKD | DGALQDTSCQVHAWPDRRRWNQTCELLPVS |
| | | | (SEQ ID NO: 4) | QASWACNLILGAPDSQKLTTVDIVTLRVLC |
| | | | | REGVRWRVMAIQDFKPFENLRLMAPISLQV |
| | | | | VHVETHRCNISWEISQASHYFERHLEFEAR |
| | | | | TLSPGHTWEEAPLLTLKQKQEWICLETLTP |
| | | | | DTQYEFQVRVKPLQGEFTTWSPWSQPLAFR |
| | | | | TKPAALGKD |
| | | | | (SEQ ID NO: 41) |
| DNA554 | Knob: | SGP | APTSSSTKKTQL | DKTHTCPPCPAPELLGGPSVFLFPPKPKDT |
| | hFc(N297A)- | (SEQ | QLRHLCLRLQMI | LMISRTPEVTCVVVDVSHEDPEVKFNWYVD |
| | [VPLSLY]- | ID | LNGINNYKNPKL | GVEVHNAKTKPREEQYASTYRVVSVITVLH |
| | hIL2 | NO: 29) | TAMLTAKFAMP | QDWLNGKEYKCKV |
| | (E15R, L18C, | | KKATELKHLQCL | SNKALPAPIEKTISKAKGQPREPQVYTLPP |
| | D20R, | | EEALKPLEEVIN | CRDELTKNQVSLWCLVKGFYPSDIAVEWES |
| | R38A, | | LAQSKNFHLRPR | NGQPENNYKTTPPVLDSDGSFFLYSKLTVD |
| | F42A, | | DLISNINVIVLEL | KSRWQQGNVFSCSVMHEALHNHYTQKSLSL |
| | Y45A, | | KGSETTFMCEY | SPGGSPGVPLSLYSGPAPTSSSTKKTQLQL |
| | E62A) | | ADETATIVEFLN | RHLCLRLQMILNGINNYKNPKLTAMLTAKF |
| | | | RWITFCQSIISTL | AMPKKATELKHLQCLEEALKPLEEVLNLAQ |
| | | | T | SKNFHLRPRDLISNINVIVLELKGSETTFM |
| | | | (SEQ ID | CEYADETATIVEFLNRWITFCQSIISTLT |
| | | | NO: 339) | (SEQ ID NO: 385) |
| DNA563 | Knob: | | APTSSSTKKTQLQL | DKTHTCPPCPAPELLGGPSVFLFPPK |
| | hFcIgG1 | | RHLCLSLQMILNGI | PKDTLMISRTPEVTCVVVDVSHEDP |
| | (N297A) | | NNYKNPKLTAMLTA | EVKFNWYVDGVEVHNAKTKPREEQY |
| | [VPLSLY]- | | KFAMPKKATELKH | ASTYRVVSVLWLHQDWLNGKEYKCK |
| | hIL2 | | LQCLEEALKPLEEV | VSNKALPAPIEKTISKAKGQPREPQ |
| | (R38A, | | LNLAQSKNFHLRPR | VYTLPPCRDELTKNQVSLWCLVKGF |
| | F42A, | | DLISLINVIVLELK | YPSDIAVEWESNGQPENNYKTTPPV |
| | Y45A, | | GSETTFMCEYADETA | IDSDGSFFLYSKLWDKSRVYQQGNV |
| | E62A, | | TIVEFLNRWITFCQS | FSCSVMHEALHNHYTQKSLSLSPGG |
| | C125A) | | IISTLT | SPGVPLSLYSGPAPTSSSTKKTQLQ |
| | | | (SEQ ID | LRMLCLRLQMILNGINNYKNPKLTA |
| | | | NO: 340) | MLTAKFAMPKKATELKHLQCLEEAL |
| | | | | KPLEEVLNLAQSKNFHLRPRDLISL |
| | | | | INVIVLELKGSETTFMCEYAOETAT |
| | | | | IVEFLNRWITFCQSIISTLT |
| | | | | (SEQ ID NO: 386) |
| DNA565 | Knob: | SGP | APTSSSTKKTQL | DKTHTCPPCPAPELLGGPSVFLFPPK |
| | hFc | (SEQ | QLLHLCLRLQMI | PKDTLMISRTPEVTCVVVDVSHEDP |
| | (N297A) | ID | LNGINNYKNPKL | EVKFNWYVDGVEVHNAKTKPREEQY |
| | [VPLSLY]- | NO: 29) | TAMLTAKFAMP | ASTYRVVSVLWLHQDWLNGKEYKCK |
| | hIL2 | | KKATELKHLQCL | VSNKALPAPIEKTISKAKGQPREPQ |
| | (E15R, | | EEALKPLEEVLN | VCTLPPCRDELTKNQVSLWCLVKGF |
| | L18C, | | LAQSKNFHLRPR | YPSDIAVEWESMGQPENNYKTTPPV |
| | D20R, | | DLISLINVIVLE | LDSDGSFFLYSKLTVDKSRWQQGNV |
| | R38A, | | LKGSETTFMCEY | FSCSVMHEALHNHYTQKSLSLSPGG |
| | F42A, | | ADETATIVEFLNR | SPGVPLSLYSGPAPTSSSTKKTQLQ |
| | Y45A, | | WITFCQSIISTLT | LLHLCLRLQMILNGINNYKNPKLTA |
| | E62A, | | (SEQ ID | MLTAKFAMPKKATELKHLQCLEEAL |
| | N88L) | | NO: 341) | KPLEEVLNLAQSKNFHLRPRDLISL |
| | | | | INVIVLELKGSETTFMCEYADETAT |
| | | | | IVEFLNRWITFCQSIISTLT |
| | | | | (SEQ ID NO: 387) |
| DNA566 | Knob: | SGP | APTSSSTKKTQL | DKTHTCPPCPAPELLGGPSVFLFPPK |
| | hFc | (SEQ | QLRHLCLDLQM | PKDTLMISRTPEVTCVCCDVSHEDP |
| | (N297A)- | ID | ILNGINNYKNPK | EVKFNWYVDGVEVHNAKTKPREEQY |
| | [VPLSLY] | NO: 29) | LTAMLTAKFAM | ASTYRVVSVLTVLHQDWLNGKEYKC |
| | hIL2 | | PKKATELKHLQC | KVSNKALPAPIEKTISKAKGQPREP |
| | (E15R, | | LEEALKPLEEVL | QVYTLPPCRDELTKMQVSLWCLVKG |
| | L18C, | | NLAQSKNFHLR | FYPSDIAVEWESNGQPENNYKTTPP |
| | R38A, | | PRDLISLINVIVL | VLDSDGSFFLYSKLTVDKSRWQQGN |
| | F42A, | | ELKGSETTFMCE | VFSCSVMHEALHNHYTQKSLSLSPG |
| | Y45A, | | YADETATIVEFL | GSPGVPLSLYSGPAPTSSSTKKTQL |
| | E62A, | | NRWITFCQSIIS | QLRHLCLDLQMILMGINNYKNPKLT |
| | N88L) | | TLT | AMLTAKFAMPKKATELKHLQCLEEA |
| | | | (SEQ ID | LKPLEEVLNWQSKNFHLRPRDLISL |
| | | | NO: 342) | INVIVLELKGSETTFMCEYADETAT |
| | | | | IVEFLNRVVITFCQSIISTLT |
| | | | | (SEQ ID NO: 388) |
| DNA565 | Knob: | | APTSSSTKKTQL | DKTHTCPPCPAPELLGGPSVFLFP |
| | hFc | | QLEHLCLRLQMI | PKPKDTLMISRTPE |
| | (N297A) | | LNGINNYKNPKL | VTCVVVDVSHEOPEVKFNWYVDGVE |
| | [VPLSLY]- | | TAMLTAKFAMP | VHNAKTKPREEQYASTYRVVSVLTV |
| | hIL2 | | KKATELKHLQCL | LHQDWLNGKEYKCKVSNKALPAPIE |
| | (L18C, | | EEALKPLEEVLN | KTISKAKGQPREPQVYTLPPCRDEL |
| | D20R, | | LAQSKNFHLRPR | TKMQVSLWCLVKGFYPSDIAVEWES |
| | R38A, | | DLISLINVIVLEL | NGQPENNYKTTPPVLDSDGSFFLYS |
| | F42A, | | KGSETTFMCEYA | KLTVDKSRWQQGNVFSCSVMHEALH |
| | Y45A, | | DETATIVEFINR | NHYTQKSLSLSPGGSPGVPLSLYSG |
| | E62A, | | WITFCQSIISTLT | PAPTSSSTKICTQLQLEHLCLRLQM |
| | N88L) | | (SEQ ID | ILNGINNYKNPKLTAMLTAKFAMPK |
| | | | NO: 343) | KATELKHLQCLEEALKPLEEVLNLA |
| | | | | QSKNFHLRPRDLISLINVIVLELKG |
| | | | | SETTFMCEYADETATIVEFLNRWIT |
| | | | | FCQSIISTLT |
| | | | | (SEQ ID NO: 389) |
| DNA568 | Knob: | SGP | APTSSSTKKT | DKTHTCPPCPAPELLGGPSVFLFPPKPKDT |
| | HFc(N297A)- | (SEQ | QLQLFHLCLR | LMISRTPEVTCVVVDVSHEDPEVKFNWYVD |
| | [VPLSLY]- | ID | LQMILNGINN | GVEVHNAKTKPREEQYASTYRWSVLTVLHQ |
| | hIL2(E15F, | NO: 29) | YKNPKLTAML | DWLNGKEYKCKVSNKALPAPIEKTISKAKG |
| | L18C, D20R, | | TAKFAMPKKA | QPREPQVYTIPPCRDEITKNQVSLWCIVKG |
| | R38A, F42A, | | TELKHLQCLE | FYPSDIAVEWESNGQPENNYKTTPPVLDSD |
| | Y45A, E62A, | | EALKPLEEVLN | GSFFLYSKLTVDKSRWQQGNVFSCSVMHEA |
| | N88L) | | LAQSKNFHLRPR | LHNHYTQKSLSLSPGGSPGVPLSLYSGPAP |
| | | | DLISLINVIVLE | TSSSTKKTQLQLFHLCLRLQMILNGINNYK |
| | | | LKGSETTFMCEY | NPKLTAMLTAKFAMPKKATELKHLQCLEEA |
| | | | ADETATIVEFLN | LKPLEEVLNLAQSKNFHIRPRDLISLINVI |
| | | | RWITFCQSIIST | VLELKGSETTFMCEYADETATIVEFLNRWI |
| | | | LT | TFCQSIISTLT (SEQ ID NO: 390) |
| | | | (SEQ ID | |
| | | | NO: 344) | |
| DNA575 | Hole: | | | DKTHTCPPCPAPELLGGPSVFLFPPKPKDT |
| | hFc(N297A, | | | LMASRTPEVTCVVVDVSHEDPEVKFNWYVD |
| | I253A)- | | | GVEVHNAIOKPREEQYASTYRVVSVLTVLH |
| | hCD122 | | | QDWLNGKEYKCKVSNKALPAPIEKTISKAK |
| | | | | GQPREPQVCTLPPSRDELTKNQVSLSCAVK |
| | | | | GFYPSDIAVEWESNGQPENNYKTTPPVLDS |
| | | | | DGSFFLVSKLTVDKSRWQQGNVFSCSVMHE |
| | | | | ALHNHYTQKSLSLSPGPGSGSAVNGTSQFT |
| | | | | CFYNSRANISCVWSQDGALQDTSCQVHAWP |
| | | | | DRRRWNQTCELLPVSQASWACNLILGAPDS |
| | | | | QKLTTVDIVTLRVLCREGVRWRVMAIQPFK |
| | | | | PFENLRIMAPISLQVVHVETHRCNISWEIS |
| | | | | QASHYFERHLEFEARTLSPGHTWEEAPLLT |
| | | | | LKQKQEWICLETLTPDTQYEFQVRVKPLQG |
| | | | | EFTTVVSPVVSQPLAFRTKPAALGKD |
| | | | | (SEQ ID NO: 43) |
| DNA576 | Hole: | | | DKTHTCPPCPAPELLGGPSVFLFPPKPKDT |
| | hFc | | | LYITREPEVTCVVVDVSHEDPEVKFNWYVD |
| | (N297A, | | | GVEVHNAKTKPREEQYASTYRVVSVLTVLH |
| | M252Y, | | | QDWLNGKEYKCKVSNKALPAPIEKTISKAK |
| | S254T, | | | GQPREPQVCTLPPSRDELTKNQVSLSCAVK |
| | T256E)- | | | GFYPSDIAVEWESNGQPENNYKTTPPVLDS |
| | hCD122 | | | DGSFFLVSKLTVDKSRWQQGNVFSCSVMHE |
| | | | | ALHNHYTQKSLSLSPGPGSGSAVNGTSQFT |
| | | | | CFYNSRANISCVWSQDGALQDTSCQVHAWP |
| | | | | DRRRWNQTCELLPVSQASWACNLILGAPDS |
| | | | | QKLTTVDIVTLRVLCREGVRWRVMAIQDFK |
| | | | | PFENLRLMAPISLQVVHVETHRCNISWEISQ |
| | | | | ASHYFERHLEFEARTISPGHTWEEAPLLTL |
| | | | | KQKQEWICLETLTPDTQYEFQVRVKPLQGE |
| | | | | FTTWSPWSQPLAFRTKPAALGKD |
| | | | | (SEQ ID NO: 392) |
| DNA577 | Knob: | | | DKTHTCPPCPAPELLGGPSVFLFPPKPKDT |
| | hFc(N297, | | | LMASRTPEVTCVVVDVSHEDPEVKFNWYVD |
| | I253A)- | | | GVEVHNAKTKPREEQYASTYRVVSVLTVLH |
| | hIL2 | | | QDWLNGKEYKCKVSNKAIPAPIEKTISKAK |
| | (R38A, | | | GQPREPQVYTLPPCRDELTKNQVSLWCLVK |
| | F42A, | | | GFYPSDIAVEWESNGQPENNYKTTPPVLDS |
| | Y45A, | | | DGSFFLYSKLTVDKSRWQQGNVFSCSVMHE |
| | E62A, | | | ALHNHYTQKSLSLSPGGGSSPPGGGSSGGG |
| | C125A) | | | SGPAPTSSSTKKTQLQLEHLLLDLQMILNG |
| | | | | INNYKNPKLTAMLTAKFAMPKKATELKHLQ |
| | | | | CLEEALKPLEEVLNIAQSKNFHLRPRDIIS |
| | | | | NINVIVLELKGSETTFMCEYADETATIVEF |
| | | | | LNRWITFAQSIISTLT |
| | | | | (SEQ ID NO: 393) |
| DNA578 | Knob: | | | DKTHTCPPCPAPELLGGPSVFLFPPKPKDT |
| | hFc | | | LYITREPEVTCVVVDVSHEDPEVKFNWYVD |
| | (N297A, | | | GVEVHNAKTKPREEQYASTYRVVSVLTVLH |
| | M252Y, | | | QDWLNGKEYKCKVSNKALPAPIEKTISKAK |
| | S254T, | | | GQPREPQVCTLPPCRDELTKNQVSLWCLVK |
| | T256E)- | | | GFYPSDIAVEWESNGQPENNYKTTPPVLDS |
| | hIL2 | | | DGSFFLYSKLTVDKSRWQQGNVFSCSVMHE |
| | (R38A, | | | ALHNHYTQKSLSLSPGGGSSPPGGGSSGGG |
| | F42A, | | | SGPAPTSSSTKKTQLQLEHLILDLQMILNG |
| | Y45A, | | | INNYKNPKLTAMLTAKFAMPKKATELKHLQ |
| | E62A, | | | CEEALKPLEEVLNLAQSKNFHLRPRDLISN |
| | C125A) | | | INVIVLELKGSETTFMCEYADETATIVEFL |
| | | | | NRWITFAQSIISTLT |
| | | | | (SEQ ID NO: 394) |
| DNA579 | Knob: | SGP | APTSSSTKKTQL | DKTHTCPPCPAPELLGGPSVFLFPPKPKDT |
| | hFc(N297, | (SEQ | QLEHLLLDLQMI | LMASRTPEVTCVVDVSHEDPEVKFNWYVDG |
| | I253A)- | ID | LNGINNYKNPKL | VEVHNAKTKPREEQYASTYRVVSVLTVLHQ |
| | [VPLSLY]- | NO: 29) | TAMLTAKFAMP | DWLNGKEYKCKVSNKALPAPIEKTISKAKG |
| | hIL2(R38A, | | KKATELKHLQCL | QPREPQVYTLPPCRDELTKNQVSLWCAVKG |
| | F42A, | | EEALKPLEEVLN | FYPSDIAVEWESNGQPE |
| | Y45A, | | LAQSKNFHLRPR | NNYKTTPPVLDSDGSFFLYSKLTVDKSRWQ |
| | E62A, | | DLISNINVIVLEL | QGNVFSCSVMHEALHNHYTQKSLSLSPGGS |
| | C125A) | | KGSETTFMCEY | PGVPLSLYSGPAPTSSSTKKTQLQIEHLLL |
| | | | ADETATIVEFLN | DLQMILNGINNYKNPKLTAMLTAKFAMPKK |
| | | | RWITFAQSIISTL | ATELKHLQCLEEALKPLEEVLNLAQSKNFH |
| | | | T | LRPRDLISNINVIVLELKGSETTFMCEYAD |
| | | | (SEQ ID | ETATIVEFLNRWITFAQSIISTLT |
| | | | NO: 3) | (SEQ ID NO: 50) |
| DNA580 | Knob: | SGP | APTSSSTKKTQL | DKTHTCPPCPAPELLGGPSVFLFPPKPKDT |
| | hFc(N297A, | (SEQ | QLEHLLLDLQMI | LYITREPEVTCVVVDVSHEDPEVKFNWYVD |
| | M252Y, | ID | LNGINNYKNPKL | GVEVHNAKTKPREEQYASTYRVVSVLTVLH |
| | S2547, | NO: 29) | TAMLTAKFAMP | QDWLNGKEYKCKVSNKALPAPIEKTISKAK |
| | T256E)- | | KKATELKHLQCL | GQPREPQVYTLPPCRDELTKNQVSLWCLVK |
| | [VPLSLY]- | | EEALKPLEEVLN | GFYPSDIAVEWESNGQPENNYKTPPVLD |
| | hIL2(R38A, | | LAQSKNFHLRPR | SDGSFFLYSKLTVDKSRWQQGNVF |
| | F42A, | | DLISNINVIVLEL | SCSVMHEALHNHYTQKSLSLSPGGSPGVPL |
| | Y45A, | | KGSETTFMCEY | SLYSGPAPTSSSTKKTQLQLEHLLLDLQMI |
| | E62A, | | ADETATIVEFLN | LNGINNYKNPKITAMLTAKFAMPKKATELK |
| | C125A) | | RWITFAQSIISTL | HLQCLEEALKPLEEVLNLAQSKNFHLRPRD |
| | | | T | LISNINVIVLELKGSETTFMCEYADETATI |
| | | | (SEQ ID | VEFLNRWITFAQSIISTLT |
| | | | NO: 3) | (SEQ ID NO: 396) |
| DNA581 | Knob: | SGP | APTSSSTKKTQL | DKTHTCPPCPAPELLGGPSVFLFPPKPKDT |
| | hFc(N297A)- | (SEQ ID | QLEHLCLDLQM | LMISRTPEVTCVVVDVSHEDPEVKFNWYVD |
| | [VPLSLY]- | NO: 29) | ILNGINNYKNPK | GVEVHNAKTKPREEQYASTYRVVSVLTVLH |
| | hIL2(L18C, | | L7AMLTAKFAM | QDWLNGKEYKCKVSNKALPAPIEKTISKAK |
| | R38A, F42A, | | PKKATELKHLQC | GQPREPQVYTLPPCRDELTKNQVSLWCLVK |
| | Y45A, E62A) | | LEEALKPLEEVL | GFYPSDIAVEWESNGQPENNYKTTPPVLDS |
| | | | NLAQSKNFHLR | DGSFFLY |
| | | | PRDLISNINVIVL | SKLTVDKSRWQQGNVFSCSVMHEALKNHYT |
| | | | ELKGSETTFMCE | QKSLSLSPGGSPGVPLSLYSGPAFTSSSTK |
| | | | YADETATIVEFL | KTQLQLEHLCLDLQMILNGINNYKNPKLTA |
| | | | NRWITFCQSHST | MLTAKFAMPKKATELKHIQCIEEALKPLEE |
| | | | LT | VLNLAQSKNFHLRPRDLISNINVIVLELKG |
| | | | (SEQ ID NO: 365) | SETTFMCEYADETATIVEFLNRWITFCQSI |
| | | | | ISTLT (SEQ ID NO: 397) |
| DNA582 | | SGP | APTSSSTKKTQL | DKTHTCPPCPAPELLGGPSVFLFPPKPKDT |
| | | (SEQ ID | QLEYLLLDLQMI | LMISRTPEVTCVVVDVSHEDPEVKFNWYVD |
| | | NO: 29) | LNGINNYKNPKL | GVEVHNAKTKPREEQYASTYRVVSVLTVLH |
| | | | TAMLTAKFAMP | QDWLNGKEYKCKVSNKALPAPIEKTISKAK |
| | | | KKATELKHLQCL | GQPREPQVYTLPPCRDELTKNQVSLWCLVK |
| | | | EEALKPLEEVIN | GFYPSDIAVEWESNGQPENNYKTTPPVLDS |
| | | | LAQSKNFHLRPR | DGSFFLY |
| | | | DLISNINVIVLEL | SKLTVDKSRWQQGNVFSCSVMHEALHNHYT |
| | | | KGSETTFMCEY | QKSISLSPGGSPGVPLSLYSGPAPTSSSTK |
| | | | ADETATIVEFLN | KTQLQLEYLLLDLQMILNGINNYKNPKLTA |
| | | | RWITFAQSIISTL | MLTAKFAMPKKATELKHLQCLEEALKPLEE |
| | | | T | VLNLAQSKNFHLRPRDLISNINVIVLELKG |
| | | | (SEQ ID NO: 346) | SETTFMCEYADETATIVEFLNRWITFAQSH |
| | | | | STLT (SEQ ID NO: 398) |
| DNA583 | Knob: | SGP | APTSSSTKKTQL | DKTHTCPPCPAPELLGGPSVFLFPPKPKDT |
| | hFc(N297A)- | (SEQ ID | QLEELLLDLQMI | LMISRTPEVTCVVVDVS |
| | [VPLSLY]- | NO: 29) | LNGINNYKNPKL | HEDPEVKFNWYVDGVEVHNAKTKPREEQYA |
| | hIL2(H16E, | | TAMLTAKFAMP | STYRVVSVLTVLHQDWLNGKEYKCKVSNKA |
| | R38A, F42A, | | KKATELKHLQCL | LPAPIEKTISKAKGQPREPQVYTLPPCRDE |
| | Y45A, E52A, | | EEALKPLEEVIN | LTKNQVSLW |
| | Cl25A) | | LAQSKNFHLRPR | CLVKGFYPSDIAVEWESNGQPENNYIOTPP |
| | | | DLISNINVIVLEL | VLDSDGSFFLYSKLTVDKSRWQQGNVFSCS |
| | | | KGSETTFMCEY | VMHEALHNHYTQKSLSLSPGGSPGVPLSLY |
| | | | ADETATIVEFLN | SGPAPTSSSTKKTQLQLEELLLDLQMILNG |
| | | | RWITFAQSIISTL | INNYKNPKLTAMLTAKFAMPKKATELKHLQ |
| | | | T | CLEEALKPLEEVLNLAQSKNFHLRPRDLISN |
| | | | (SEQ ID NO: 347) | INVIVLELKGSETTFMCEYADETATIVEFL |
| | | | | NRWITFAQSIISTLT |
| | | | | (SEQ ID NO: 399) |
| DNA584 | Knob: | SGP | APTSSSTKKTQL | DKTHTCPPCPAPELLGGPSVFLFPPKPKDT |
| | hFc(N297A)- | (SEQ ID | QLEHLLLLLQMI | LMISRTPEVTCVVVDVSHEDPEVKFNWYVD |
| | [VPLSLY]- | NO: 29) | LNGINNYKNPKL | GVEVHNAKTKPREEQYASTYRVVSVLTVLH |
| | hIL2,(D20L, | | TAMLTAKFAMP | QDWLNGKEYKCKVSNKALPAPIEKTISKAK |
| | R38A, F42A, | | KKATELKHLQCL | GQPREPQVYTLPPCRDELTKNQVSLWCLVK |
| | Y45A, E62A, | | EEALKPLEEVIN | GFYPSDIAVEWESNGQPENNYKTTPPVLDS |
| | C125A) | | LAQSKNFHLRPR | DGSFFLYSKLTVDKSRWQQGNVFSCSVMHE |
| | | | DLISNINVIVLEL | ALHNHYTQKSLSLSPGGSPGVPLSLYSGPA |
| | | | KGSETTFMCEY | PTSSSTKKTQLQLEHLLLLLQMILNGINNY |
| | | | ADETATIVEFLN | KNPKLTAMLTAKFAMPKKATELKHLQCLEE |
| | | | RWITFAQSIISTL | ALKPLEEVLNLAQSKNFHLRPRDLISNINV |
| | | | T | IVLELKGSETTFMCEYADETATIVEFLNRW |
| | | | (SEQ ID NO: | ITFAQSIISTLT (SEQ ID NO: 400) |
| | | | 348) | |
| DNA585 | Knob: | SGP | APTSSSTKKTQL | DKTHTCPPCPAPELLGGPSVFLFPPKPKDT |
| | hFc(N297A)- | (SEQ ID | QLEYLCLDLQMI | LMISRTPEVTCVVVDVSHEDPEVKFNWYVD |
| | [VPLSLY]- | NO: 29) | LNGiNNYKNPKL | GVEVHNAKTKPREEQYASTYRVVSVLTVLH |
| | hIL2(H16Y, | | TAMLTAKFAMP | QDWLNGKEYKCKVSNKALPAPIEKTISKAK |
| | R38A, F42A, | | KKATELKHLQCL | GQPREPQVYTLPPCRDELTKNQVSLWCLVK |
| | Y45A, E52A, | | EEALKPLEEVLN | GFYPSDIAVEWESNGQPENNYKTTPPVLDS |
| | Cl25A) | | LAQSKNFHLRPR | DGSFFLYSKLTVDKSRWQQGNVFSCSVMHE |
| | | | DLISNINVIVLEL | ALHNHYTQKSLSLSPGGSPGVPLSLYSGPA |
| | | | KGSETTFMCEY | PTSSSTKKTQLQLEYLCLDLQMILNGINNY |
| | | | ADETATIVEFLN | KNPKLTAMLTAKFAMPKKATELKHLQCLEE |
| | | | RWITFCQSIISTL | ALKPLEEVLNLAQSKNFHLRPRDLISNINV |
| | | | T | IVLELKGSETTFMCEYADETATIVEFLNRW |
| | | | (SEQ ID NO: | ITFCQSIISTLT (SEQ ID NO: 401) |
| | | | 349) | |
| DNA586 | Knob: | SGP | APTSSSTKKTQL | DKTHTCPPCPAPELLGGPSVFLFPPKPKDT |
| | hFc(N297A)- | (SEQ ID | QLEELCLDLQMI | LMISRTPEVTCVVVDVSHEOPEV |
| | [VPLSLY]- | NO: 29) | LNGINNYKNPKL | KFNWYVDGVEVHNAKTKPREEQYASTYRVV |
| | hIL2(H16E, | | TAMLTAKFAMP | SVLTVLHQDVVLNGKEYKCKVSNKALPAPI |
| | L18C, R38A, | | KKATELKHLQCL | EKTISKAKGQPREPQVYTLPPCRDELTKNQ |
| | F42A, Y45A, | | EEALKPLEEVLN | VSLWCLVKGFYPSDIAVEWESNGQPEN |
| | E62A) | | LAQSKNFHLRPR | NYKTTPPVLDSDGSFFLYSKLTVDKSRWQQ |
| | | | DLISNINVIVLEL | GNVFSCSVMHEALHNHYTQKSLSLSPGGSP |
| | | | KGSETTFMCEY | GVPLSLYSGPAPTSSSTKKTQLQLEELCLD |
| | | | ADETATIVEFLN | LQMILNGINNYKNPKLTAMLTAKFAMPKKA |
| | | | RWITFCQSIISTL | TELKHLQCLEEALKPLEEVLNLAQSKNFHL |
| | | | (SEQ ID NO: | RPRDLISNINVIVLELKGSETTFMCEYADE |
| | | | 350) | TATIVEFLNRWITFCQSIISTLT |
| | | | | (SEQ ID NO: 402) |
| DNA587 | Knob: | SGP | APTSSSTKKTQL | DKTHTCPPCPAPELLGGPSVFLFPPKPKDT |
| | hFc(N297A)- | (SEQ ID | QLEHLCLLLQMI | LMISRTPEVTCVVVDVSHEDPEVKFNWYVD |
| | [VPLSLY]- | NO: 29) | LNGINNYKNPKL | GVEVHNAKTKPREEQYASTYRVVSVLTVLH |
| | hIL2(L18C, | | TAMLTAKFAMP | QPWLNGKEYKCKVSNKALPAPIEKTISKAK |
| | D20L, R38A, | | KKATELKHLQCL | GQPREPQVYTLPPCRDELTKMQVSLWCLVK |
| | F42A, Y45A, | | EEALKPLEEVLN | GFYPSDIAVEWESMGQPENNYKTTPPVLDS |
| | E62A) | | LAQSKNFHLRPR | DGSFFLYSKLTVDKSRWQQGNVFSCSVMHE |
| | | | DLISNINVIVLEL | ALHNHYTQKSLSLSPGGSPGVPLSLYSGPA |
| | | | KGSETTFMCEY | PTSSSTKKTQLQLEHLCLLLQMILNGINNY |
| | | | ADETATIVEFLN | KNPKLTAMLTAKFAMPKKATELKHLQCLEE |
| | | | RWITFCQSIISTL | ALKPLEEVLNLAQSKNFHLRPRDLISNINV |
| | | | T | IVLELKGSETTFMCBYADETATIVEFLNRW |
| | | | (SEQ ID NO: 351) | ITFCQSIISTLT (SEQ ID NO: 403) |
| DNA588 | Knob: | SGP | APTSSSTKKTQL | DKTHTCPPCPAPELLGGPSVFLFPPKPKDT |
| | hFc(N297A)- | (SEQ ID | QLEYLCLLLQMI | LMISRTPEVTCVVVDVSHEDPEVKFNWYVD |
| | [VPLSLY]- | NO: 29) | LNGINNYKNPKL | GVEVHNAICTKPREEQYASTYRVVSVLTVL |
| | hIL2(H16Y, | | TAMLTAKFAMP | HQDWLNGKEYKCKVSNKALPAPIEKTISKA |
| | L18C, | | KKATELKHLQCL | KGQPREPQVYTLPPCRDELTKNQVSLWCLV |
| | D20L, R38A, | | EEALKPLEEVLN | KGFYPSDIAVEWESNGQPENNYKTTPPVLD |
| | F42A, Y45A, | | LAQSKNFHLRPR | SDGSFFLY |
| | E62A) | | DLISNINVIVLEL | SKLTVDKSRWQQGNVFSCSVMHEALHNHYT |
| | | | KGSETTFMCEY | QKSLSLSPGGSPGVPLSLYSGPAPTSSSTK |
| | | | ADETATIVEFLN | KTQLQIEYLCLLLQMILNGINNYKNPKLTA |
| | | | RWITFCQSIISTL | MLTAKFAMPKKATELKHLQCLEEALKPLEE |
| | | | T | VLNLAQSKNFHLRPRDLISNINVIVLELKG |
| | | | (SEQ ID | SETTFMCEYADETATIVEFLNRWITFCQSI |
| | | | NO: 352) | ISTLT (SEQ ID NO: 404) |
| DNA589 | Knob: | SGP | APTSSSTKKTQL | DKTHTCPPCPAPELLGGPSVFLFPPKPKDT |
| | hFc(N297A)- | (SEQ ID | QLEELCLLLQMI | LMISRTPEVTCVVVDVSHEDPEVKFNWWDG |
| | [VPLSLY]- | NO: 29) | LNGINNYKNPKL | VEVHNAKTKPREEQYASTYRVVSVLTVLHQ |
| | hIL2(H16E, | | TAMLTAKFAMP | DWLNGKEVKCKVSNKALPAPIFKTISKAKG |
| | L18C, | | KKATELKHLQCL | QPRFPQVYTLPPCRDELTKNQVSIAVCLVK |
| | D20L, R38A, | | EEALKPLEEVLN | GFYPSDIAVEWESNGQPENNYKTTPPVLDS |
| | F42A, Y45A, | | LAQSKNFHLRPR | DGSFFLYSKLTVDKSRWQQGNVFSCSVMHE |
| | E62A) | | DLISNINVIVLEL | ALHNHYTQKSLSLSPGGSPGVPLSLYSGPA |
| | | | KGSETTFMCEY | PTSSSTKKTQLQLEELCLLLQMILNGINNY |
| | | | ADETATIVEFLN | KNPKLT |
| | | | RWITFCQSIISTL | AMLTAKFAMPKKATELKHLQCLEEALKPLE |
| | | | T (SEQ ID NO: | EVLNLAQSKNFHLRPRDLISNINVIVLELK |
| | | | 353) | GSETTFMCEYADETATIVEFLNRWITFCQS |
| | | | | IISTLT (SEQ ID NO: 405) |
| DNA603 | Hole: | | | ESKYGPPCPPCPAPEFLGGPSVFLFPPKPK |
| | hFcIgG4- | | | DTLMISRTPEVTCVVVDVSQEDPEVQFNWY |
| | hCD122 | | | VDGVEVHNAKTKPREEQFNSTYRVVSVLTV |
| | | | | LHQDWLNGKEYKCKVSNKGLPSSIEKTISK |
| | | | | AKGQPREPQVCTLPPSQEEMTKNQVSLSCA |
| | | | | VKGFYPSDIAVEWESNGQPENNYKTTPPVL |
| | | | | DSDGSFFLYSRLTVDKSRWQEGNVFSCSVM |
| | | | | HEALHNHYTQKSLSLSL |
| | | | | GPGSGSAVNGTSQFTCFYNSRANISCVWSQ |
| | | | | DGALQDTSCQVHAWPDRRRWNQTCELLPVS |
| | | | | QASWACNLILGAPDSQKLTTVDIVTLRVLC |
| | | | | REGVRWRVMAIQDFKPFENLRLMAPISLQW |
| | | | | HVETHRCNISW |
| | | | | EISQASHYFERHLEFEARTLSPGHTWEEAP |
| | | | | LLTLKQKQEWICLETLTPDTQYEFQVRVKP |
| | | | | LQGEFTTWSPWSQPLAFRTKPAALGKD |
| | | | | (SEQ ID NO: 406) |
| DNA604 | Knob: | | | ESKYGPPCPPCPAPEFLGGPSVFLFPPKPK |
| | IgG4 | | | DTLMISRTPEVTCVVVDVSQEDPEVQFNWY |
| | hFc- | | | VDGVEVHNAKTKPREEQFNSTYRVVSVLTV |
| | hIL2(R38A, | | | LHQDWLNGKEYKCKVSNKGLPSSIEKTISK |
| | F42A, Y45A, | | | AKGQPREPQVYTLPPCQEEMTKNQVSLWCL |
| | E62A, C125A) | | | VKGFYPSDIAVEWESNGQPENNYKTTPPVL |
| | | | | DSDGSFFLYSRLTVDKSRWQEGNVFSCSVM |
| | | | | HEALHNHYTQKSLSLSLGGGSSPPGGGSSG |
| | | | | GGSGPAPTSSSTKKTQLQLEHLLLDLQMIL |
| | | | | NGINNYKNPKLTAMLTAKFAMPKKATELKH |
| | | | | LQCLEEALKPLEEVLNLAQSKNFHLRPRDL |
| | | | | ISNINVIVLELKGSETTFMCEYADETATIV |
| | | | | EFLNRWITFAQSIISTLT |
| | | | | (SEQ ID NO: 407) |
| DNA605 | Knob: | SGP | APTSSSTKKTQL | ESKYGPPCPPCPAPEFLGGPSVFLFPPKPK |
| | hFcIgG4-hIL2- | (SEQ ID | QLEHLLLDLQMI | DTLMISRTPEVTCVVVDVSQEDPEVQFNWY |
| | [VPLSLY]- | NO: 29) | LNGINNYKNPKL | VDGVEVHNAKTKPREEQFNSTYRVVSVLTV |
| | hIL2(R38A, | | TAMLTAKFAMP | LHQDWLMGKEYKCKVSNKGLPSSIEKTISK |
| | F42A, Y45A, | | KKATELKHLQCL | AKGQPREPQVYTLPPCQEEMTKNQVSLWCL |
| | E62A, C125A) | | EEALKPLEEVLN | VKGFYPSDIAVEWESMGQPENNYKTTPPVL |
| | | | LAQSKNFHLRPR | DSDGSFFLYSRLTVDKSRWQEGNVFSCSVM |
| | | | DLISNINVIVL | HEALHNHYTQKSLSLSLGGSPGVPLSLYSG |
| | | | ELKGSETTFMC | PAPTSSSTKKTQLQLEHLLLDLQMILNGIN |
| | | | EYADETATIVEF | NYKNPKLTAMLTAKFAMPKKATELKHLQCL |
| | | | LNRWITFAQSII | EEALKPLEEVLNLAQSKNFHLRPRDLISNI |
| | | | STLT | NVIVLELKGSETTFMCEYAOETATIVEFLN |
| | | | (SEQ ID | RWITFAQSIISTLT (SEQ ID NO: 408) |
| | | | NO: 3) | |
| DNA606 | Hole: | SGGG | AVNGTSQFTCF | DKTHTCPPCPAPELLGGPSVFLFPPKPKDTL |
| | hFc(N297A)- | (SEQ | YNSRANISCVW | MISRTPEYTCVVVDVSHEDPEVKFNWYVDG |
| | [RAAAVKSP] | ID | SQDGALQDTSC | VEVHNAKTKPREEQYASTYRVVSVLTVLHQ |
| | hCD122 | NO: | QVHAWPDRRR | DWLNGKEYKCKVSNKALPAPIEKTISKAKG |
| | | 30) | WNQTCELLPVS | QPREPQVCTLPPSRDELTKNQVSLSCAVKG |
| | | | QASWACNLILG | FYPSDIAVEWESMGQPENNYKTTPPVLDSD |
| | | | APDSQKLTTVDI | GSFFLVSKLTVDKSRWQQGNVFSCSVMHEA |
| | | | VTLRVLCREGVR | LHNHYTQKSLSLSPGGPPSGSSPRAAAVKS |
| | | | WRVMAIQDFK | PSGGGAVNGTSQFTCFYNSRANISCVLVSQ |
| | | | PFENLRLMAPIS | OGALQDTSCQVHAWPDRRRWNQTCELLPVS |
| | | | LQVVHVETHRC | QASWACNLILGAPDSQKLTTVDIVTLRVLC |
| | | | NISWEISQASHY | REGVRWRVMAIQDFKPFENLRLMAPISLQV |
| | | | FERHLEFEARTL | VHVETHRCNISWEISQASHYFERHLEFEAR |
| | | | SPGHTWEEAPL | TLSPGHTWEEAPLLTLKQKQEWICLETLTP |
| | | | LTLKQKQEWICL | DTQYEFQVRVKPLQGEFITWSPWSQPLAFR |
| | | | ETLTPDTQYEFQ | TKPAALGKD (SEQ ID NO: 409) |
| | | | VRVKPLQGEFTT | |
| | | | WSPWSQPLAFR | |
| | | | TKPAALGKD | |
| | | | (SEQ ID NO: 4) | |
| DNA608 | Hole: | SGGG | AVNGTSQFTCF | DKTHTCPPCPAPELLGGPSVFLFPPKPKDTL |
| | hFc(N297A, | (SEQ | YNSRANISCVW | MASRTPEVTCVVVDVSHEDPEVKFNWYVDG |
| | I253A)- | ID | SQDGALQDTSC | VEVHNAKTKPREEQYASTYRVVSVLTVLHQ |
| | [MPYDLYHP]- | NO: | QVHAWPDRRR | DWLNGKEYKCKVSNKALPAPIEKTISKAKG |
| | hCD122 | 30) | WNQTCELLPVS | OPREPQVCTLPPSRDELTKNQVSLSCAVKG |
| | | | QASWACNLILG | FYPSDIAVEWESNGQPENNYKTTPPVLDSD |
| | | | APDSQKLTTVDI | GSFFLVSKLTVDKSRWQQGNVFSCSVMHEA |
| | | | VTLRVLCREGVR | LHNHYTQKSLSLSPGGPPSGSSPMPYDLYH |
| | | | WRVMAIQDFK | PSGGGAVNGTSQFTCFYNSRANISCVWSQD |
| | | | PFENLRLMAPIS | GALQDTSCQVHAWPDRRRWNQTCELLPVSQ |
| | | | LQVVHVETHRC | ASWACNLILGAPDSQKLTTVDIVTLRVLCRE |
| | | | NISWEISQASHY | GVRWRVMAIQDFKPFENLRLMAPISLQVVH |
| | | | FERHLEFEARTL | VETHRCNISWEISQASHYFERHLEFEARTL |
| | | | SPGHTWEEAPL | SPGHTWEEAPLLTLKQKQEWICLETLTPDT |
| | | | LTLKQKQEWICL | QYEFQVRVKPLQGEFTTWSPWSQPLAFRTK |
| | | | ETLTPDTQYEFQ | PAALGKD (SEQ ID NO: 410) |
| | | | VRVKPLQGEFTT | |
| | | | WSPWSQPLAFR | |
| | | | TKPAALGKD | |
| | | | (SEQ ID NO: 4) | |
| DNA609 | Hole: | GSGGG | AVNGTSQFTCF | DKTHTCPPCPAPELLGGPSVFLFPPKPKDTL |
| | hFc(N297A, | (SEQ | YNSRANISCVW | MASRTPEVTCVVVDVSHEDPEVKFNWWDGV |
| | I253A)- | ID | SQDGALQDTSC | EVHNAKTKPREEQYASTYRVVSVLTVLHQD |
| | [VPLSLY]- | NO: | QVHAWPDRRR | WLNGKEYKCKVSNKALPAPIEKTISKAKGQ |
| | hCD122 | 31) | WNQTCELLPVS | PREPQVCTLPPSRDELTKNQVSLSCAVKGF |
| | | | QASWACNLILG | YPSDIAVEVVESNGQPENNYKTTPPVLDSD |
| | | | APDSQKLTTVDI | 6SFFLVSKLTVDKSRWQQGNVFSCSVMHEAL |
| | | | VTLRVLCREGVR | HNHYTQKSLSLSPGGPPSGSSPGVPLSLYG |
| | | | WRVMAIQDFK | SGGGAVNGTSQFTCFYNSRANISCVWSQDG |
| | | | PFENLRLMAPIS | ALQDTSCQVHAWPDRRRWNQTC |
| | | | LQVVHVETHRC | ELLPVSQASWACNLILGAPDSQKLTTVDIV |
| | | | NISWEISQASHY | TLRVLCREGVRWRVMAIQDFKPFENLRLMA |
| | | | FERHLEFEARTL | PISLQVVHVETHRCNISWEISQASHYFERH |
| | | | SPGHTWEEAPL | LEFEARTLSPGHTWEEAPLLTLKQKQEWIC |
| | | | LTLKQKQEWICL | LETLTPDTQYEFQVRVKPLQGEFTTWSPWS |
| | | | ETLTPDTQYEFQ | QPLAFRTKPAALGKD |
| | | | VRVKPLQGEFTT | (SEQ ID NO: 411) |
| | | | WSPWSQPLAFR | |
| | | | TKPAALGKD | |
| | | | (SEQ ID NO: 4) | |
| DNA612 | Hole: | SGGG | AVNGTSQFTCF | DKTHTCPPCPAPELLGGPSVFLFPPKPKDTL |
| | hFc(N297A)- | (SEQ ID | YNSRANISCVW | MISRTPEVTCVVVDVSHEDPEVKFNWYVDG |
| | [MPYDLYHP]- | NO: 30) | SQDGALQDTSC | VEVHNAKTKPREEQYASTYRVVSVLTVLHQ |
| | hCD122 | | QVHAWPDRRR | DWLNGKEYKCKVSNKALPAPIEKTISKAKG |
| | (C122S, | | WNQTCELLPVS | QPREPQVCTLPPSRDELTKNQVSLSCAVKG |
| | C168S) | | QASWACNLILG | FYPSQIAVEWESNGQPENNYKTTPPVLDSD |
| | | | APDSQKLTTVDI | GSFFLVSKLTVDKSRWQQGNVFSCSVMHEA |
| | | | VTLRVLCREGVR | LHNHYTQKSLSLSPGGPPSGSSPMPYDLYH |
| | | | WRVMAIQDRC | PSGGGAVNGTSQFTCFYNSRANISCVWSQD |
| | | | PFENLRLMAPIS | GALQDTSCQVHAWPDRRRWNQTCELLPVSQ |
| | | | LQWHVETHRS | ASWACIMLILGAPDSQKLTTVDIVTLRVLC |
| | | | NISWEISQASHY | REGVRWRVMAIQDFKPFENLRLMAPISLQV |
| | | | FERHLEFEARTL | VHVETHRSNISWEISQASHYFERHLEFEAR |
| | | | SPGHTWEEAPL | TISPGHTWEEAPLLTIKQKQEWISLETLTP |
| | | | LTLKQKQEWISL | DTQYEFQVRVKPLQGEFTTWSPWSQPLAFR |
| | | | ETLTPDTQYEFQ | TKPAALGKD (SEQ ID NO: 40) |
| | | | VRVKPLQGEFTT | |
| | | | WSPWSQPLAFR | |
| | | | TKPAALGKD | |
| | | | (SEQ ID NO: 5) | |
| ANA614 | Hole: | SGGG | AVNGTSQFTCF | DKTHTCPPCPAPELLGGPSVFLFPPKPKDT |
| | hFc(N297A)- | (SEQ ID | YNSRANISCVW | LMISRTPEVTCVVVDVSHEDPEVKFNWYVD |
| | [DSGGMLT]- | NO: 30) | SQDGALQDTSC | GVEVHNAKTKPREEQYASTYRVVSVLTVLH |
| | hCD122 | | QVHAWPDRRR | QDWLNGKEYKCKVSNKALPAPIEKTISKAK |
| | (C122S, | | WNQTCELLPVS | GQPREPQVCTLPPSRDELTKNQVSLSCAVK |
| | C168S) | | QASWACNLILG | GFYPSQIAVEWESNGQPENNYKTTPPVLDS |
| | | | APDSQKLTTVDI | DGSFFLVSKLTVDKSRWQQGNVFSCSVMHE |
| | | | VTLRVLCREGVR | ALHNHYTQKSLSLSPGGPPSGSSPGDSGGF |
| | | | WRVMAIQDRC | MLTSGGGAVNGTSGFTCFYNSRANISCVWS |
| | | | PFENLRLMAPIS | QDGALQDTSCQVHAWPDRRRWNQTCELLPV |
| | | | LQWHVETHRS | SQASWACNLILGAPDSQKLTTVDIVTLRVL |
| | | | NISWEISQASHY | CREGVRWRVMAIQDFKPFENLRLMAPISLQ |
| | | | FERHLEFEARTL | VVHVETHRSNISWEISQASHYFERHLEFEA |
| | | | SPGHTWEEAPL | RTLSPGHTWEEAPLLTLKQKQEWISLETIT |
| | | | LTLKQKQEWISL | PDTQYEFQVRVKPLQGEFTTWSPWSQPLAF |
| | | | ETLTPDTQYEFQ | RTKPAALGKD (SEQ ID NO: 413) |
| | | | VRVKPLQGEFTT | |
| | | | WSPWSQPLAFR | |
| | | | TKPAALGKD | |
| | | | (SEQ ID NO: 5) | |
| DNA623 | Knob: | SGP | APTSSSTKKTQL | DKTHTCPPCPAPELLGGPSVFLFPPKPKDTL |
| | hFc(N297, | (SEQ | QLEHLLLDLQMI | MASRTPEVTCVVVDVSHEDPEVKFNWYVDG |
| | I253A)- | ID | LNGINNYKNPKL | VEVHNAKTKPREEQYASTYRVVSVLTVLHQ |
| | [MPYDLYHP] | NO: | TAMLTAKFAMP | PWLNGKEYKCKVSNKALPAPIEKTISKAKG |
| | hIL2 | 29) | KKATELKHLQCL | QPREEQVYTLPPCRDELTKNQVSLWCLVKG |
| | (R38A, | | EEALKPLEEVLN | FYPSDIAVEWESNGQPENNYKTTPPVLDSD |
| | F42A, | | LAQSKNFHLRPR | GSFFLYSKLTVDKSRWQQGNVFSCSVMHEA |
| | Y45A, | | DLISNINVIVL | LHNHYTOKSLSLSPGGGSSPPMPYDLYHPS |
| | E62A, | | ELKGSETTFMC | GPAPTSSSTKKTQLQLEHLLLDLQMILNGI |
| | C125A) | | EYADETATIVEF | NNYKNPKLTAMLTAKFAMPKKATELKHLQC |
| | | | LNRWITFAQSII | LEEALXPLEEVLNLAQSKNFHLRPRDLISN |
| | | | STLT | INVIVLELKGSETTFMCEYADETATIVEFL |
| | | | (SEQ ID | NRWITFAQSIISTLT |
| | | | NO: 3) | (SEQ ID NO: 415) |
| DNA625 | Hole: | | | DKTHTCPPCPAPELLGGPSVFLFPP |
| | hFc(N297, | | | KPKDTLMASRTPEVTCVVVDVSHEQ |
| | I253A) | | | PEVKFNWYVDGVEVHNAKTKPREEQ |
| | | | | YASTYRVVSVLTVLHQDWLNGKEYK |
| | | | | CKVSNKALPAPIEKTISKAKGQPRE |
| | | | | PQVCTLPPSRDELTKNQVSLSCAVK |
| | | | | GFYPSDIAVEWESNGQPENNYKTTP |
| | | | | PVLDSDGSFFIVSKLTVDKSRWQQG |
| | | | | NVFSCSVMHEALHNHYTQKSLSLSP |
| | | | | G (SEQ ID NO: 10) |
| DNA626 | Hole: | | | ESKYGPPCPPCPAPEFLGGPSVFLFPPKPK |
| | hFcIGg4 | | | DTLMISRTPEVTCVVVDVSQEDPEVQFNWY |
| | | | | VDGVEVHNAKTKPREEQFNSTYRVVSVLTV |
| | | | | LHQDWLNGKEYKCKVSNKGLPSSIEKTISK |
| | | | | AKGQPREPQVCTLPPSQEEMTKNQVSLSCA |
| | | | | VKGFYPSDIAVEWESNGQPENNYKTTPPVL |
| | | | | DSDGSFFLYSRLTVDKSRWQEGNVFSCSVM |
| | | | | HEALHNHYTQKSLSLSLGPG |
| | | | | (SEQ ID NO: 298) |
| DNA669 | Hole: | | | DKTHTCPPCPAPELLGGPSVFLFPPKPKDT |
| | hFc- | | | LMISRTPEVTCVVVDVSHEDPEVKFNWYVD |
| | hCD122 | | | GVEVHNAKTKPREEQYNSTYRVVSVLTVLH |
| | | | | QDWINGKEYKCKVSNKALPAPIEKTISKAK |
| | | | | GQPREPQVCTLPPSRDELTKNQVSLSCAVK |
| | | | | GFYPSDIAVEWESNGQPENNYKTTPPVLDS |
| | | | | DGSFFLVSKLTVDKSRWQQGNVFSCSVMHE |
| | | | | ALHMHYTQKSLSLSPGPGSGSAVNGTSQFT |
| | | | | CFYNSRANISCVWSQDGALQDTSCQVHAWP |
| | | | | DRRRWNQTCELLPVSQASWACNLILGAPDS |
| | | | | QKLTTVDIVTLRVLCREGVRWRVMAIQDFK |
| | | | | PFENLRLMAPISLQWHVETHRCNISWEISQ |
| | | | | ASHYFERHLEFEARTLSPGHTWEEAPLLTL |
| | | | | KQKQEWICLETLTPDTQYEFQVRVKPLQGE |
| | | | | FTTWSPWSQPLAFRTKPAALGKD |
| | | | | (SEQ ID NO: 422) |
| DNA670 | Knob: | | | DKTHTCPPCPAPELLGGPSVFLFPPKPKDT |
| | hFc- | | | LMISRTPEVTCWVDVSHEDPEVKFNWYVDG |
| | hIL2(R38A, | | | VEVHNAKTKPREEQYNSTYRWSVLTVLHQD |
| | F42A, Y45A, | | | WLNGKEYKCKVSNKALPAPIEKTISKAKGQ |
| | E62A, C125A) | | | PREPQWTLPPCRDELTKNQVSLWCLVKGFY |
| | | | | PSDIAVEWESNGQPENNYKTTPPVLDSDGS |
| | | | | FFLYSKLTVDKSRWQQGNVFSCSVMHEALH |
| | | | | NHYTQKSLSLSPGGGSSPPGGGSSGGGSGP |
| | | | | APTSSSTKKTQLQLEHLLLDLQMILNGINN |
| | | | | YKNPKLTAMLTAKFAMPKKATELKHLQCLE |
| | | | | EALKPLEEVLNLAQSKNFHLRPRDLISNIN |
| | | | | VIVLELKGSETTFMCEYADETATIVEFLNR |
| | | | | WITFAQSIISTLT |
| | | | | (SEQ ID NO: 423) |
| DNA671 | Knob: hFc- | SGP | APTSSSTKKTQL | DKTHTCPPCPAPELLGGPSVFLFPPKPKDT |
| | [VPLSLY]- | (SEQ ID | QLEHLLLDLQMI | IMISRTPEVTCVVVDVSHEDPEVKFNWYV |
| | hIL2 | NO: 29) | LNGINNYKNPKL | DGVEVHNAKTKPREEQYNSTYRVVSV |
| | (R38A, F42A, | | TAMLTAKFAMP | LTVLHQDWLNGKEYKCKVSNKALPAPIEKT |
| | Y45A, E62A, | | KKATELKHLQCL | ISKAKGQPREPQVYTLPPCRDELTKNQVSL |
| | C125A) | | EEALKPLEEVLN | WCLVKGFYPSDIAVEWESNGQPENNYKTTP |
| | | | LAQSKNFHLRPR | PVLCSDGSFFLYSKLTVDKSRWQQGNVFSC |
| | | | DLISNINVIVLEL | SVMHEALHNHYTQKSLSLSPGSSPGVPLSL |
| | | | KGSETTFMCEY | YSGPAPTSSSTKKTQLQLEHLLLDLQMILN |
| | | | ADETATIVEFLN | GINNYKNPKLTAMLTAKFAMPKKATELKHL |
| | | | RWITFAQSIISTL | QCIEEALKPLEEVLNLAQSKNFHIRPRDLI |
| | | | T | SNINVIVLELKGSETTFMCEYADETATIVE |
| | | | (SEQ ID | FLNRWITFAQSRSTLT |
| | | | NO: 3) | (SEQ ID NO: 424) |
| DNA672 | Hole: hFc- | GSGGG | AVNGTSQFTCF | DKTHTCPPCPAPELLGGPSVFIFPPKPKDTL |
| | [VPLSLY]- | (SEQ | YNSRANISCVW | MISRTPEVTCVVVDVSHEDPEVKFNWYVDG |
| | hCD122 | ID | SQDGALQDTSC | VEVHNAKTKPREEQYNSTYRVVSVLTVLHQ |
| | | NO: | QVHAWPDRRR | DWLNGKEYKCKVSNKALPAPIEKTISKAKG |
| | | 31) | WNQTCELLPVS | QPREPQVCTLPPSRDELTKNQVSLSCAVKG |
| | | | QASWACNLILG | FYPSDIAVEWESNGQPENNYKTTPPVLDSD |
| | | | APDSQKLTTVDI | GSFFLVSKLTVDKSRWQQGNVFSCSVMHEA |
| | | | VTLRVLCREGVR | LHNHYTQKSLSLSPGGPPSGSSPGVPLSLY |
| | | | WRVMAIQDFK | GSGGGAVNGTSQFTCFYNSRANISCVWSQD |
| | | | PFENLRLMAPIS | GALQDTSCQVHAWPDRRRWNQTCELLPVSQ |
| | | | LQVVHVETHRC | ASWACNLILGAPDSQKLTTVDIVTIRVLCR |
| | | | NISWEISQASHY | EGVRWRVMAIQDFKPFENLRLMAPISLQVV |
| | | | FERHLEFEARTL | HVETHRCNISWEISQASHYFERHLEFEART |
| | | | SPGHTWEEAPL | LSPGHTWEEAPLITIKQKQEWSCIETITPD |
| | | | LTLKQKQEWICL | TQYEFQVRVKPLQGEFTTWSPWSQPLAFRT |
| | | | ETLTPDTQYEFQ | KPAALGKD (SEQ ID NO: 425) |
| | | | VRVKPLQGEFTT | |
| | | | WSPWSQPLAFR | |
| | | | TKPAALGKD | |
| | | | (SEQ ID NO: 4) | |

The application's sequence listing, which the Patent Office published only in electronic form, follows.

SEQUENCE LISTING (434 sequences)

SEQ ID NO: 1 - protein, 153 aa, Artificial Sequence
  Cytokine
MYRMQLLSCIALSLALVTNSAPTSSSTKKTQLQLEHLLLDLQMILNGINNYKNPKLTRMLTFKFYMPKKATELKHLQCLEEELKPLEEVLNLAQSKNFHLRPRDLISNINVIVLELKGSETTFMCEYADETATIVEFLNRWITFCQSIISTLT

SEQ ID NO: 2 - protein, 133 aa, Artificial Sequence [sequence omitted]

SEQ ID NO: 3 - protein, 133 aa, Artificial Sequence
  Cytokine
APTSSSTKKTQLQLEHLLLDLQMILNGINNYKNPKLTAMLTAKFAMPKKATELKHLQCLEEALKPLEEVLNLAQSKNFHLRPRDLISNINVIVLELKGSETTFMCEYADETATIVEFLNRWITFAQSIISTLT

SEQ ID NO: 4 - protein, 213 aa, Artificial Sequence
  Masking moiety
AVNGTSQFTCFYNSRANISCVWSQDGALQDTSCQVHAWPDRRRWNQTCELLPVSQASWACNLILGAPDSQKLTTVDIVTLRVLCREGVRWRVMAIQDFKPFENLRLMAPISLQVVHVETHRCNISWEISQASHYFERHLEFEARTLSPGHTWEEAPLLTLKQKQEWICLETLTPDTQYEFQVRVKPLQGEFTTWSPWSQPLAFRTKPAALGKD

SEQ ID NO: 5 - protein, 213 aa, Artificial Sequence
  Masking moiety
AVNGTSQFTCFYNSRANISCVWSQDGALQDTSCQVHAWPDRRRWNQTCELLPVSQASWACNLILGAPDSQKLTTVDIVTLRVLCREGVRWRVMAIQDFKPFENLRLMAPISLQVVHVETHRSNISWEISQASHYFERHLEFEARTLSPGHTWEEAPLLTLKQKQEWISLETLTPDTQYEFQVRVKPLQGEFTTWSPWSQPLAFRTKPAALGKD

SEQ ID NO: 6 - protein, 330 aa, Artificial Sequence [sequence omitted]

SEQ ID NO: 7 - protein, 226 aa, Artificial Sequence
  Fc
DKTHTCPPCPAPELLGGPSVFLFPPKPKDTLMISRTPEVTCVVVDVSHEDPEVKFNWYVDGVEVHNAKTKPREEQYNSTYRVVSVLTVLHQDWLNGKEYKCKVSNKALPAPIEKTISKAKGQPREPQVYTLPPSRDELTKNQVSLTCLVKGFYPSDIAVEWESNGQPENNYKTTPPVLDSDGSFFLYSKLTVDKSRWQQGNVFSCSVMHEALHNHYTQKSLSLSPG

SEQ ID NO: 8 - protein, 226 aa, Artificial Sequence
  Fc
DKTHTCPPCPAPELLGGPSVFLFPPKPKDTLMISRTPEVTCVVVDVSHEDPEVKFNWYVDGVEVHNAKTKPREEQYNSTYRVVSVLTVLHQDWLNGKEYKCKVSNKALPAPIEKTISKAKGQPREPQVCTLPPSRDELTKNQVSLSCAVKGFYPSDIAVEWESNGQPENNYKTTPPVLDSDGSFFLVSKLTVDKSRWQQGNVFSCSVMHEALHNHYTQKSLSLSPG

SEQ ID NO: 9 - protein, 226 aa, Artificial Sequence
  Fc
DKTHTCPPCPAPELLGGPSVFLFPPKPKDTLMISRTPEVTCVVVDVSHEDPEVKFNWYVDGVEVHNAKTKPREEQYASTYRVVSVLTVLHQDWLNGKEYKCKVSNKALPAPIEKTISKAKGQPREPQVCTLPPSRDELTKNQVSLSCAVKGFYPSDIAVEWESNGQPENNYKTTPPVLDSDGSFFLVSKLTVDKSRWQQGNVFSCSVMHEALHNHYTQKSLSLSPG

SEQ ID NO: 10 - protein, 226 aa, Artificial Sequence
  Fc
DKTHTCPPCPAPELLGGPSVFLFPPKPKDTLMASRTPEVTCVVVDVSHEDPEVKFNWYVDGVEVHNAKTKPREEQYASTYRVVSVLTVLHQDWLNGKEYKCKVSNKALPAPIEKTISKAKGQPREPQVCTLPPSRDELTKNQVSLSCAVKGFYPSDIAVEWESNGQPENNYKTTPPVLDSDGSFFLVSKLTVDKSRWQQGNVFSCSVMHEALHNHYTQKSLSLSPG

SEQ ID NO: 11 - protein, 226 aa, Artificial Sequence
  Fc
DKTHTCPPCPAPELLGGPSVFLFPPKPKDTLMISRTPEVTCVVVDVSHEDPEVKFNWYVDGVEVHNAKTKPREEQYNSTYRVVSVLTVLHQDWLNGKEYKCKVSNKALPAPIEKTISKAKGQPREPQVYTLPPCRDELTKNQVSLWCLVKGFYPSDIAVEWESNGQPENNYKTTPPVLDSDGSFFLYSKLTVDKSRWQQGNVFSCSVMHEALHNHYTQKSLSLSPG

SEQ ID NO: 12 - protein, 226 aa, Artificial Sequence
  Fc
DKTHTCPPCPAPELLGGPSVFLFPPKPKDTLMISRTPEVTCVVVDVSHEDPEVKFNWYVDGVEVHNAKTKPREEQYASTYRVVSVLTVLHQDWLNGKEYKCKVSNKALPAPIEKTISKAKGQPREPQVYTLPPCRDELTKNQVSLWCLVKGFYPSDIAVEWESNGQPENNYKTTPPVLDSDGSFFLYSKLTVDKSRWQQGNVFSCSVMHEALHNHYTQKSLSLSPG

SEQ ID NO: 13 - protein, 226 aa, Artificial Sequence
  Fc
DKTHTCPPCPAPELLGGPSVFLFPPKPKDTLMASRTPEVTCVVVDVSHEDPEVKFNWYVDGVEVHNAKTKPREEQYASTYRVVSVLTVLHQDWLNGKEYKCKVSNKALPAPIEKTISKAKGQPREPQVYTLPPCRDELTKNQVSLWCLVKGFYPSDIAVEWESNGQPENNYKTTPPVLDSDGSFFLYSKLTVDKSRWQQGNVFSCSVMHEALHNHYTQKSLSLSPG

SEQ ID NO: 14 - protein, 5 aa, Artificial Sequence
  Linker
PGSGS

SEQ ID NO: 15 - protein, 21 aa, Artificial Sequence
  Linker
GPPSGSSPGDSGGFMLTSGGG

SEQ ID NO: 16 - protein, 20 aa, Artificial Sequence
  Liner
GPPSGSSPGVPLSLYGSGGG

SEQ ID NO: 17 - protein, 20 aa, Artificial Sequence
  Linker
GPPSGSSPMPYDLYHPSGGG

SEQ ID NO: 18 - protein, 17 aa, Artificial Sequence
  Linker
GGSSPPMPYDLYHPSGP

SEQ ID NO: 19 - protein, 13 aa, Artificial Sequence
  Linker
GSPGVPLSLYSGP

SEQ ID NO: 20 - protein, 15 aa, Artificial Sequence
  Linker
GGSGRAAAVKSPSGP

SEQ ID NO: 21 - protein, 13 aa, Artificial Sequence
  Linker
GGSGHEQLTVSGP

SEQ ID NO: 22 - protein, 15 aa, Artificial Sequence
  Linker
GSGPDSGGFMLTSGP

SEQ ID NO: 23 - protein, 17 aa, Artificial Sequence
  Linker
GGSSPPGGGSSGGGSGP

SEQ ID NO: 24 - protein, 8 aa, Artificial Sequence
  Cleavable peptide
MPYDLYHP

SEQ ID NO: 25 - protein, 8 aa, Artificial Sequence
  Cleavable peptide
DSGGFMLT

SEQ ID NO: 26 - protein, 6 aa, Artificial Sequence
  Cleavable peptide
HEQLTV

SEQ ID NO: 27 - protein, 8 aa, Artificial Sequence
  Cleavable peptide
RAAAVKSP

SEQ ID NO: 28 - protein, 6 aa, Artificial Sequence
  Cleavable peptide
VPLSLY

SEQ ID NO: 29 - skipped

SEQ ID NO: 30 - protein, 4 aa, Artificial Sequence
  Linker
SGGG

SEQ ID NO: 31 - protein, 5 aa, Artificial Sequence
  Linker
GSGGG

SEQ ID NO: 32 - protein, 6 aa, Artificial Sequence
  Linker
GGSSPP

SEQ ID NO: 33 - protein, 4 aa, Artificial Sequence
  Linker
GSGP

SEQ ID NO: 34 - protein, 4 aa, Artificial Sequence
  Linker
GSPG

SEQ ID NO: 35 - protein, 4 aa, Artificial Sequence
  Linker
GGSG

SEQ ID NO: 36 - protein, 9 aa, Artificial Sequence
  Linker
GPPSGSSPG

SEQ ID NO: 37 - protein, 8 aa, Artificial Sequence
  Linker
GPPSGSSP

SEQ ID NO: 38 - protein, 444 aa, Artificial Sequence
  Polypeptide chain
DKTHTCPPCPAPELLGGPSVFLFPPKPKDTLMISRTPEVTCVVVDVSHEDPEVKFNWYVDGVEVHNAKTKPREEQYASTYRVVSVLTVLHQDWLNGKEYKCKVSNKALPAPIEKTISKAKGQPREPQVCTLPPSRDELTKNQVSLSCAVKGFYPSDIAVEWESNGQPENNYKTTPPVLDSDGSFFLVSKLTVDKSRWQQGNVFSCSVMHEALHNHYTQKSLSLSPGPGSGSAVNGTSQFTCFYNSRANISCVWSQDGALQDTSCQVHAWPDRRRWNQTCELLPVSQASWACNLILGAPDSQKLTTVDIVTLRVLCREGVRWRVMAIQDFKPFENLRLMAPISLQVVHVETHRCNISWEISQASHYFERHLEFEARTLSPGHTWEEAPLLTLKQKQEWICLETLTPDTQYEFQVRVKPLQGEFTTWSPWSQPLAFRTKPAALGKD

SEQ ID NO: 39 - protein, 444 aa, Artificial Sequence
  Polypeptide chain
DKTHTCPPCPAPELLGGPSVFLFPPKPKDTLMISRTPEVTCVVVDVSHEDPEVKFNWYVDGVEVHNAKTKPREEQYASTYRVVSVLTVLHQDWLNGKEYKCKVSNKALPAPIEKTISKAKGQPREPQVCTLPPSRDELTKNQVSLSCAVKGFYPSDIAVEWESNGQPENNYKTTPPVLDSDGSFFLVSKLTVDKSRWQQGNVFSCSVMHEALHNHYTQKSLSLSPGPGSGSAVNGTSQFTCFYNSRANISCVWSQDGALQDTSCQVHAWPDRRRWNQTCELLPVSQASWACNLILGAPDSQKLTTVDIVTLRVLCREGVRWRVMAIQDFKPFENLRLMAPISLQVVHVETHRSNISWEISQASHYFERHLEFEARTLSPGHTWEEAPLLTLKQKQEWISLETLTPDTQYEFQVRVKPLQGEFTTWSPWSQPLAFRTKPAALGKD

SEQ ID NO: 40 - protein, 459 aa, Artificial Sequence
  Polypeptide chain
DKTHTCPPCPAPELLGGPSVFLFPPKPKDTLMISRTPEVTCVVVDVSHEDPEVKFNWYVDGVEVHNAKTKPREEQYASTYRVVSVLTVLHQDWLNGKEYKCKVSNKALPAPIEKTISKAKGQPREPQVCTLPPSRDELTKNQVSLSCAVKGFYPSDIAVEWESNGQPENNYKTTPPVLDSDGSFFLVSKLTVDKSRWQQGNVFSCSVMHEALHNHYTQKSLSLSPGGPPSGSSPMPYDLYHPSGGGAVNGTSQFTCFYNSRANISCVWSQDGALQDTSCQVHAWPDRRRWNQTCELLPVSQASWACNLILGAPDSQKLTTVDIVTLRVLCREGVRWRVMAIQDFKPFENLRLMAPISLQVVHVETHRSNISWEISQASHYFERHLEFEARTLSPGHTWEEAPLLTLKQKQEWISLETLTPDTQYEFQVRVKPLQGEFTTWSPWSQPLAFRTKPAALGKD

SEQ ID NO: 41 - protein, 460 aa, Artificial Sequence
  Polypeptide chain
DKTHTCPPCPAPELLGGPSVFLFPPKPKDTLMISRTPEVTCVVVDVSHEDPEVKFNWYVDGVEVHNAKTKPREEQYASTYRVVSVLTVLHQDWLNGKEYKCKVSNKALPAPIEKTISKAKGQPREPQVCTLPPSRDELTKNQVSLSCAVKGFYPSDIAVEWESNGQPENNYKTTPPVLDSDGSFFLVSKLTVDKSRWQQGNVFSCSVMHEALHNHYTQKSLSLSPGGPPSGSSPGDSGGFMLTSGGGAVNGTSQFTCFYNSRANISCVWSQDGALQDTSCQVHAWPDRRRWNQTCELLPVSQASWACNLILGAPDSQKLTTVDIVTLRVLCREGVRWRVMAIQDFKPFENLRLMAPISLQVVHVETHRCNISWEISQASHYFERHLEFEARTLSPGHTWEEAPLLTLKQKQEWICLETLTPDTQYEFQVRVKPLQGEFTTWSPWSQPLAFRTKPAALGKD

SEQ ID NO: 42 - protein, 459 aa, Artificial Sequence
  Polypeptide chain
DKTHTCPPCPAPELLGGPSVFLFPPKPKDTLMISRTPEVTCVVVDVSHEDPEVKFNWYVDGVEVHNAKTKPREEQYASTYRVVSVLTVLHQDWLNGKEYKCKVSNKALPAPIEKTISKAKGQPREPQVCTLPPSRDELTKNQVSLSCAVKGFYPSDIAVEWESNGQPENNYKTTPPVLDSDGSFFLVSKLTVDKSRWQQGNVFSCSVMHEALHNHYTQKSLSLSPGGPPSGSSPGVPLSLYGSGGGAVNGTSQFTCFYNSRANISCVWSQDGALQDTSCQVHAWPDRRRWNQTCELLPVSQASWACNLILGAPDSQKLTTVDIVTLRVLCREGVRWRVMAIQDFKPFENLRLMAPISLQVVHVETHRCNISWEISQASHYFERHLEFEARTLSPGHTWEEAPLLTLKQKQEWICLETLTPDTQYEFQVRVKPLQGEFTTWSPWSQPLAFRTKPAALGKD

SEQ ID NO: 43 - protein, 444 aa, Artificial Sequence
  Polypeptide chain
DKTHTCPPCPAPELLGGPSVFLFPPKPKDTLMASRTPEVTCVVVDVSHEDPEVKFNWYVDGVEVHNAKTKPREEQYASTYRVVSVLTVLHQDWLNGKEYKCKVSNKALPAPIEKTISKAKGQPREPQVCTLPPSRDELTKNQVSLSCAVKGFYPSDIAVEWESNGQPENNYKTTPPVLDSDGSFFLVSKLTVDKSRWQQGNVFSCSVMHEALHNHYTQKSLSLSPGPGSGSAVNGTSQFTCFYNSRANISCVWSQDGALQDTSCQVHAWPDRRRWNQTCELLPVSQASWACNLILGAPDSQKLTTVDIVTLRVLCREGVRWRVMAIQDFKPFENLRLMAPISLQVVHVETHRCNISWEISQASHYFERHLEFEARTLSPGHTWEEAPLLTLKQKQEWICLETLTPDTQYEFQVRVKPLQGEFTTWSPWSQPLAFRTKPAALGKD

SEQ ID NO: 44 - protein, 459 aa, Artificial Sequence
  Polypeptide chain
DKTHTCPPCPAPELLGGPSVFLFPPKPKDTLMISRTPEVTCVVVDVSHEDPEVKFNWYVDGVEVHNAKTKPREEQYASTYRVVSVLTVLHQDWLNGKEYKCKVSNKALPAPIEKTISKAKGQPREPQVCTLPPSRDELTKNQVSLSCAVKGFYPSDIAVEWESNGQPENNYKTTPPVLDSDGSFFLVSKLTVDKSRWQQGNVFSCSVMHEALHNHYTQKSLSLSPGGPPSGSSPMPYDLYHPSGGGAVNGTSQFTCFYNSRANISCVWSQDGALQDTSCQVHAWPDRRRWNQTCELLPVSQASWACNLILGAPDSQKLTTVDIVTLRVLCREGVRWRVMAIQDFKPFENLRLMAPISLQVVHVETHRCNISWEISQASHYFERHLEFEARTLSPGHTWEEAPLLTLKQKQEWICLETLTPDTQYEFQVRVKPLQGEFTTWSPWSQPLAFRTKPAALGKD

SEQ ID NO: 45 - protein, 376 aa, Artificial Sequence
  Polypeptide chain
DKTHTCPPCPAPELLGGPSVFLFPPKPKDTLMISRTPEVTCVVVDVSHEDPEVKFNWYVDGVEVHNAKTKPREEQYASTYRVVSVLTVLHQDWLNGKEYKCKVSNKALPAPIEKTISKAKGQPREPQVYTLPPCRDELTKNQVSLWCLVKGFYPSDIAVEWESNGQPENNYKTTPPVLDSDGSFFLYSKLTVDKSRWQQGNVFSCSVMHEALHNHYTQKSLSLSPGGGSSPPMPYDLYHPSGPAPTSSSTKKTQLQLEHLLLDLQMILNGINNYKNPKLTAMLTAKFAMPKKATELKHLQCLEEALKPLEEVLNLAQSKNFHLRPRDLISNINVIVLELKGSETTFMCEYADETATIVEFLNRWITFAQSIISTLT

SEQ ID NO: 46 - protein, 374 aa, Artificial Sequence
  Polypeptide chain
DKTHTCPPCPAPELLGGPSVFLFPPKPKDTLMISRTPEVTCVVVDVSHEDPEVKFNWYVDGVEVHNAKTKPREEQYASTYRVVSVLTVLHQDWLNGKEYKCKVSNKALPAPIEKTISKAKGQPREPQVYTLPPCRDELTKNQVSLWCLVKGFYPSDIAVEWESNGQPENNYKTTPPVLDSDGSFFLYSKLTVDKSRWQQGNVFSCSVMHEALHNHYTQKSLSLSPGGGSGRAAAVKSPSGPAPTSSSTKKTQLQLEHLLLDLQMILNGINNYKNPKLTAMLTAKFAMPKKATELKHLQCLEEALKPLEEVLNLAQSKNFHLRPRDLISNINVIVLELKGSETTFMCEYADETATIVEFLNRWITFAQSIISTLT

SEQ ID NO: 47 - protein, 372 aa, Artificial Sequence
  Polypeptide chain
DKTHTCPPCPAPELLGGPSVFLFPPKPKDTLMISRTPEVTCVVVDVSHEDPEVKFNWYVDGVEVHNAKTKPREEQYASTYRVVSVLTVLHQDWLNGKEYKCKVSNKALPAPIEKTISKAKGQPREPQVYTLPPCRDELTKNQVSLWCLVKGFYPSDIAVEWESNGQPENNYKTTPPVLDSDGSFFLYSKLTVDKSRWQQGNVFSCSVMHEALHNHYTQKSLSLSPGGGSGHEQLTVSGPAPTSSSTKKTQLQLEHLLLDLQMILNGINNYKNPKLTAMLTAKFAMPKKATELKHLQCLEEALKPLEEVLNLAQSKNFHLRPRDLISNINVIVLELKGSETTFMCEYADETATIVEFLNRWITFAQSIISTLT

SEQ ID NO: 48 - protein, 374 aa, Artificial Sequence
  Polypeptide chain
DKTHTCPPCPAPELLGGPSVFLFPPKPKDTLMISRTPEVTCVVVDVSHEDPEVKFNWYVDGVEVHNAKTKPREEQYASTYRVVSVLTVLHQDWLNGKEYKCKVSNKALPAPIEKTISKAKGQPREPQVYTLPPCRDELTKNQVSLWCLVKGFYPSDIAVEWESNGQPENNYKTTPPVLDSDGSFFLYSKLTVDKSRWQQGNVFSCSVMHEALHNHYTQKSLSLSPGGSGPDSGGFMLTSGPAPTSSSTKKTQLQLEHLLLDLQMILNGINNYKNPKLTAMLTAKFAMPKKATELKHLQCLEEALKPLEEVLNLAQSKNFHLRPRDLISNINVIVLELKGSETTFMCEYADETATIVEFLNRWITFAQSIISTLT

SEQ ID NO: 49 - protein, 372 aa, Artificial Sequence
  Polypeptide chain
DKTHTCPPCPAPELLGGPSVFLFPPKPKDTLMISRTPEVTCVVVDVSHEDPEVKFNWYVDGVEVHNAKTKPREEQYASTYRVVSVLTVLHQDWLNGKEYKCKVSNKALPAPIEKTISKAKGQPREPQVYTLPPCRDELTKNQVSLWCLVKGFYPSDIAVEWESNGQPENNYKTTPPVLDSDGSFFLYSKLTVDKSRWQQGNVFSCSVMHEALHNHYTQKSLSLSPGGSPGVPLSLYSGPAPTSSSTKKTQLQLEHLLLDLQMILNGINNYKNPKLTAMLTAKFAMPKKATELKHLQCLEEALKPLEEVLNLAQSKNFHLRPRDLISNINVIVLELKGSETTFMCEYADETATIVEFLNRWITFAQSIISTLT

SEQ ID NO: 50 - protein, 372 aa, Artificial Sequence
  Polypeptide chain
DKTHTCPPCPAPELLGGPSVFLFPPKPKDTLMASRTPEVTCVVVDVSHEDPEVKFNWYVDGVEVHNAKTKPREEQYASTYRVVSVLTVLHQDWLNGKEYKCKVSNKALPAPIEKTISKAKGQPREPQVYTLPPCRDELTKNQVSLWCLVKGFYPSDIAVEWESNGQPENNYKTTPPVLDSDGSFFLYSKLTVDKSRWQQGNVFSCSVMHEALHNHYTQKSLSLSPGGSPGVPLSLYSGPAPTSSSTKKTQLQLEHLLLDLQMILNGINNYKNPKLTAMLTAKFAMPKKATELKHLQCLEEALKPLEEVLNLAQSKNFHLRPRDLISNINVIVLELKGSETTFMCEYADETATIVEFLNRWITFAQSIISTLT

SEQ ID NO: 51 - protein, 376 aa, Artificial Sequence
  Polypeptide chain
DKTHTCPPCPAPELLGGPSVFLFPPKPKDTLMISRTPEVTCVVVDVSHEDPEVKFNWYVDGVEVHNAKTKPREEQYASTYRVVSVLTVLHQDWLNGKEYKCKVSNKALPAPIEKTISKAKGQPREPQVYTLPPCRDELTKNQVSLWCLVKGFYPSDIAVEWESNGQPENNYKTTPPVLDSDGSFFLYSKLTVDKSRWQQGNVFSCSVMHEALHNHYTQKSLSLSPGGGSSPPGGGSSGGGSGPAPTSSSTKKTQLQLEHLLLDLQMILNGINNYKNPKLTAMLTAKFAMPKKATELKHLQCLEEALKPLEEVLNLAQSKNFHLRPRDLISNINVIVLELKGSETTFMCEYADETATIVEFLNRWITFAQSIISTLT

SEQ ID NO: 52 - protein, 140 aa, Artificial Sequence
  Cleavage product
LYHPSGPAPTSSSTKKTQLQLEHLLLDLQMILNGINNYKNPKLTAMLTAKFAMPKKATELKHLQCLEEALKPLEEVLNLAQSKNFHLRPRDLISNINVIVLELKGSETTFMCEYADETATIVEFLNRWITFAQSIISTLT

SEQ ID NO: 53 - protein, 140 aa, Artificial Sequence
  Cleavage product
VKSPSGPAPTSSSTKKTQLQLEHLLLDLQMILNGINNYKNPKLTAMLTAKFAMPKKATELKHLQCLEEALKPLEEVLNLAQSKNFHLRPRDLISNINVIVLELKGSETTFMCEYADETATIVEFLNRWITFAQSIISTLT

SEQ ID NO: 54 - protein, 139 aa, Artificial Sequence
  Cleavage product
LTVSGPAPTSSSTKKTQLQLEHLLLDLQMILNGINNYKNPKLTAMLTAKFAMPKKATELKHLQCLEEALKPLEEVLNLAQSKNFHLRPRDLISNINVIVLELKGSETTFMCEYADETATIVEFLNRWITFAQSIISTLT

SEQ ID NO: 55 - protein, 140 aa, Artificial Sequence
  Cleavage product
FMLTSGPAPTSSSTKKTQLQLEHLLLDLQMILNGINNYKNPKLTAMLTAKFAMPKKATELKHLQCLEEALKPLEEVLNLAQSKNFHLRPRDLISNINVIVLELKGSETTFMCEYADETATIVEFLNRWITFAQSIISTLT

SEQ ID NO: 56 - protein, 138 aa, Artificial Sequence
  Cleavage product
LYSGPAPTSSSTKKTQLQLEHLLLDLQMILNGINNYKNPKLTAMLTAKFAMPKKATELKHLQCLEEALKPLEEVLNLAQSKNFHLRPRDLISNINVIVLELKGSETTFMCEYADETATIVEFLNRWITFAQSIISTLT

SEQ ID NO: 57 - protein, 615 aa, Artificial Sequence
  Cleavage product
DKTHTCPPCPAPELLGGPSVFLFPPKPKDTLMISRTPEVTCVVVDVSHEDPEVKFNWYVDGVEVHNAKTKPREEQYASTYRVVSVLTVLHQDWLNGKEYKCKVSNKALPAPIEKTISKAKGQPREPQVYTLPPCRDELTKNQVSLWCLVKGFYPSDIAVEWESNGQPENNYKTTPPVLDSDGSFFLYSKLTVDKSRWQQGNVFSCSVMHEALHNHYTQKSLSLSPGGGSSPPGGGSSGGGSGPAPTSSSTKKTQLQLEHLLLDLQMILNGINNYKNPKLTAMLTAKFAMPKKATELKHLQCLEEALKPLEEVLNLAQSKNFHLRPRDLISNINVIVLELKGSETTFMCEYADETATIVEFLNRWITFAQSIISTLTDKTHTCPPCPAPELLGGPSVFLFPPKPKDTLMISRTPEVTCVVVDVSHEDPEVKFNWYVDGVEVHNAKTKPREEQYASTYRVVSVLTVLHQDWLNGKEYKCKVSNKALPAPIEKTISKAKGQPREPQVCTLPPSRDELTKNQVSLSCAVKGFYPSDIAVEWESNGQPENNYKTTPPVLDSDGSFFLVSKLTVDKSRWQQGNVFSCSVMHEALHNHYTQKSLSLSPGGPPSGSSPGDSGG

SEQ ID NO: 58 - protein, 615 aa, Artificial Sequence
  Cleavage product
DKTHTCPPCPAPELLGGPSVFLFPPKPKDTLMISRTPEVTCVVVDVSHEDPEVKFNWYVDGVEVHNAKTKPREEQYASTYRVVSVLTVLHQDWLNGKEYKCKVSNKALPAPIEKTISKAKGQPREPQVYTLPPCRDELTKNQVSLWCLVKGFYPSDIAVEWESNGQPENNYKTTPPVLDSDGSFFLYSKLTVDKSRWQQGNVFSCSVMHEALHNHYTQKSLSLSPGGGSSPPGGGSSGGGSGPAPTSSSTKKTQLQLEHLLLDLQMILNGINNYKNPKLTAMLTAKFAMPKKATELKHLQCLEEALKPLEEVLNLAQSKNFHLRPRDLISNINVIVLELKGSETTFMCEYADETATIVEFLNRWITFAQSIISTLTDKTHTCPPCPAPELLGGPSVFLFPPKPKDTLMISRTPEVTCVVVDVSHEDPEVKFNWYVDGVEVHNAKTKPREEQYASTYRVVSVLTVLHQDWLNGKEYKCKVSNKALPAPIEKTISKAKGQPREPQVCTLPPSRDELTKNQVSLSCAVKGFYPSDIAVEWESNGQPENNYKTTPPVLDSDGSFFLVSKLTVDKSRWQQGNVFSCSVMHEALHNHYTQKSLSLSPGGPPSGSSPGVPLS

SEQ ID NO: 59 - protein, 614 aa, Artificial Sequence
  Cleavage product
DKTHTCPPCPAPELLGGPSVFLFPPKPKDTLMISRTPEVTCVVVDVSHEDPEVKFNWYVDGVEVHNAKTKPREEQYASTYRVVSVLTVLHQDWLNGKEYKCKVSNKALPAPIEKTISKAKGQPREPQVYTLPPCRDELTKNQVSLWCLVKGFYPSDIAVEWESNGQPENNYKTTPPVLDSDGSFFLYSKLTVDKSRWQQGNVFSCSVMHEALHNHYTQKSLSLSPGGGSSPPGGGSSGGGSGPAPTSSSTKKTQLQLEHLLLDLQMILNGINNYKNPKLTAMLTAKFAMPKKATELKHLQCLEEALKPLEEVLNLAQSKNFHLRPRDLISNINVIVLELKGSETTFMCEYADETATIVEFLNRWITFAQSIISTLTDKTHTCPPCPAPELLGGPSVFLFPPKPKDTLMISRTPEVTCVVVDVSHEDPEVKFNWYVDGVEVHNAKTKPREEQYASTYRVVSVLTVLHQDWLNGKEYKCKVSNKALPAPIEKTISKAKGQPREPQVCTLPPSRDELTKNQVSLSCAVKGFYPSDIAVEWESNGQPENNYKTTPPVLDSDGSFFLVSKLTVDKSRWQQGNVFSCSVMHEALHNHYTQKSLSLSPGGPPSGSSPMPYD

SEQ ID NO: 60 - protein, 164 aa, Artificial Sequence
  Masking moiety
ELCDDDPPEIPHATFKAMAYKEGTMLNCECKRGFRRIKSGSLYMLCTGNSSHSSWDNQCQCTSSATRNTTKQVTPQPEEQKERKTTEMQSPMQPVDQASLPGHCREPPPWENEATERIYHFVVGQMVYYQCVQGYRALHRGPAESVCKMTHGKTRWTQPQLICT

SEQ ID NO: 61 - skipped

SEQ ID NO: 62 - protein, 133 aa, Artificial Sequence
  Cytokine
APTSSSTKKTQLQLEHLLLDLQMILNGINNYKNPKLTRMLTFKFYMPKKATELKHLQCLEEELKPLEEVLNLAQSKNFHLRPRDLISNINVIVLELKGSETTFMCEYADETATIVEFLNRWITFAQSIISTLT

SEQ ID NO: 63 - protein, 35 aa, Artificial Sequence
  Linker
GGGGGGGGGGGGGGGGGGGGGGGGGGGGGGGGGGG

SEQ ID NO: 64 - protein, 188 aa, Artificial Sequence
  Masking moiety
AVNGTSQFTCFYNSRANISCVWSQDGALQDTSCQVHAWPDRRRWNQTCELLPVSQASWACNLILGAPDSQKLTTVDIVTLRVLCREGVRWRVMAIQDFKPFENLRLMAPISLQVVHVETHRCNISWEISQASHYFERHLEFEARTLSPGHTWEEAPLLTLKQKQEWICLETLTPDTQYEFQVRVKPLQ

SEQ ID NO: 65 - protein, 226 aa, Artificial Sequence
  Fc
DKTHTCPPCPAPELLGGPSVFLFPPKPKDTLMISRTPEVTCVVVDVSHEDPEVKFNWYVDGVEVHNAKTKPREEQYASTYRVVSVLTVLHQDWLNGKEYKCKVSNKALPAPIEKTISKAKGQPREPQVYTLPPSRDELTKNQVSLTCLVKGFYPSDIAVEWESNGQPENNYKTTPPVLDSDGSFFLYSKLTVDKSRWQQGNVFSCSVMHEALHNHYTQKSLSLSPG

SEQ ID NO: 66 - protein, 767 aa, Artificial Sequence
  Polypeptide chain
DKTHTCPPCPAPELLGGPSVFLFPPKPKDTLMISRTPEVTCVVVDVSHEDPEVKFNWYVDGVEVHNAKTKPREEQYASTYRVVSVLTVLHQDWLNGKEYKCKVSNKALPAPIEKTISKAKGQPREPQVYTLPPSRDELTKNQVSLTCLVKGFYPSDIAVEWESNGQPENNYKTTPPVLDSDGSFFLYSKLTVDKSRWQQGNVFSCSVMHEALHNHYTQKSLSLSPGPAELCDDDPPEIPHATFKAMAYKEGTMLNCECKRGFRRIKSGSLYMLCTGNSSHSSWDNQCQCTSSATRNTTKQVTPQPEEQKERKTTEMQSPMQPVDQASLPGHCREPPPWENEATERIYHFVVGQMVYYQCVQGYRALHRGPAESVCKMTHGKTRWTQPQLICTGGGGGGGGGGGGGGGGGGGGGGGGGGGGGGGGGGGAPTSSSTKKTQLQLEHLLLDLQMILNGINNYKNPKLTRMLTFKFYMPKKATELKHLQCLEEELKPLEEVLNLAQSKNFHLRPRDLISNINVIVLELKGSETTFMCEYADETATIVEFLNRWITFAQSIISTLTGPPSGSSPMPYDLYHPSGGGAVNGTSQFTCFYNSRANISCVWSQDGALQDTSCQVHAWPDRRRWNQTCELLPVSQASWACNLILGAPDSQKLTTVDIVTLRVLCREGVRWRVMAIQDFKPFENLRLMAPISLQWHVETHRCNISWEISQASHYFERHLEFEARTLSPGHTWEEAPLLTLKQKQEWICLETLTPDTQYEFQVRVKPLQ

SEQ ID NO: 67 - protein, 359 aa, Artificial Sequence
  Polypeptide chain
DKTHTCPPCPAPELLGGPSVFLFPPKPKDTLMISRTPEVTCVVVDVSHEDPEVKFNWYVDGVEVHNAKTKPREEQYASTYRVVSVLTVLHQDWLNGKEYKCKVSNKALPAPIEKTISKAKGQPREPQVYTLPPSRDELTKNQVSLTCLVKGFYPSDIAVEWESNGQPENNYKTTPPVLDSDGSFFLYSKLTVDKSRWQQGNVFSCSVMHEALHNHYTQKSLSLSPGAPTSSSTKKTQLQLEHLLLDLQMILNGINNYKNPKLTRMLTFKFYMPKKATELKHLQCLEEELKPLEEVLNLAQSKNFHLRPRDLISNINVIVLELKGSETTFMCEYADETATIVEFLNRWITFAQSIISTLT

SEQ ID NO: 68 - protein, 359 aa, Artificial Sequence
  Polypeptide chain
DKTHTCPPCPAPELLGGPSVFLFPPKPKDTLMISRTPEVTCVVVDVSHEDPEVKFNWYVDGVEVHNAKTKPREEQYASTYRVVSVLTVLHQDWLNGKEYKCKVSNKALPAPIEKTISKAKGQPREPQVYTLPPSRDELTKNQVSLTCLVKGFYPSDIAVEWESNGQPENNYKTTPPVLDSDGSFFLYSKLTVDKSRWQQGNVFSCSVMHEALHNHYTQKSLSLSPGAPTSSSTKKTQLQLEHLLLDLQMILNGINNYKNPKLTAMLTAKFAMPKKATELKHLQCLEEALKPLEEVLNLAQSKNFHLRPRDLISNINVIVLELKGSETTFMCEYADETATIVEFLNRWITFAQSIISTLT

SEQ ID NO: 69 - protein, 133 aa, Artificial Sequence
  Cytokine
APTSSSTKKTQLQLEHLLLDLQMILNGINNYKNPKLTRMLTFKFYMPKKATELKHLQCLEERLKPLEEVLNLAQSKNFHLRPRDLISNINVIVLELKGSETTFMCEYADETATIVEFLNRWITFAQSIISTLT

SEQ ID NO: 70 - protein, 133 aa, Artificial Sequence
  Cytokine
APTSSSTKKTQLQLEHLLLDLQMILNGINNYKNPKLTRMLTEKFYMPKKATELKHLQCLEEELKPLEEVLNLAQSKNFHLRPRDLISNINVIVLELKGSETTFMCEYADETATIVEFLNRWITFAQSIISTLT

SEQ ID NO: 71 - protein, 133 aa, Artificial Sequence
  Cytokine
APTSSSTKKTQLQLEHLLLDLQMILNGINNYKNPKLTRMLTFKFYMPKKATELKHLQCLEFSLKPLFFVLNLAQSKNFHLRPRDLISNINVIVLFLKGSETTFMCFYADFTATIVFFLNRWITFAQSIISTLT

SEQ ID NO: 72 - protein, 133 aa, Artificial Sequence
  Cytokine
APTSSSTKKTQLQLEHLLLDLQMILNGINNYKNPKLTRMLTAKFYMPKKATELKHLQCLEEELKPLEEVLNLAQSKNFHLRPRDLISNINVIVLELKGSETTFMCEYADETATIVEFLNRWITFAQSIISTLT

SEQ ID NO: 73 - protein, 133 aa, Artificial Sequence
  Cytokine
APTSSSTKKTQLQLEHLLLDLQMILNGINNYKNPKLTRMLTFKFRMPKKATELKHLQCLEEELKPLEEVLNLAQSKNFHLRPRDLISNINVIVLELKGSETTFMCEYADETATIVEFLNRWITFAQSIISTLT

SEQ ID NO: 74 - protein, 133 aa, Artificial Sequence
  Cytokine
APTSSSTKKTQLQLEHLLLDLQMILNGINNYKNPKLTRMLTSKFYMPKKATELKHLQCLEESLKPLEEVLNLAQSKNFHLRPRDLISNINVIVLELKGSETTFMCEYADETATIVEFLNRWITFAQSIISTLT

SEQ ID NO: 75 - protein, 4 aa, Artificial Sequence
  Linker
PGSG

SEQ ID NO: 76 - protein, 17 aa, Artificial Sequence
  Linker
GGSSPPRAAAVKSPSGP

SEQ ID NO: 77 - protein, 17 aa, Artificial Sequence
  Linker
GGPGGPRAAAVKSPSGP

SEQ ID NO: 78 - protein, 13 aa, Artificial Sequence
  Linker
GSPGVPLSLYSGP

SEQ ID NO: 79 - protein, 227 aa, Artificial Sequence
  Fc
DKTHTCPPCPAPELLGGPSVFLFPPKPKDTLMISRTPEVTCVVVDVSHEDPEVKFNWYVDGVEVHNAKTKPREEQYASTYRVVSVLTVLHQDWLNGKEYKCKVSNKALPAPIEKTISKAKGQPREPQVCTLPPSRDELTKNQVSLSCAVKGFYPSDIAVEWESNGQPENNYKTTPPVLDSDGSFFLVSKLTVDKSRWQQGNVFSCSVMHEALHNHYTQKSLSLSPGK

SEQ ID NO: 80 - protein, 226 aa, Artificial Sequence
  Fc
DKTHTCPPCPAPELLGGPSVFLFPPKPKDTLMISRTPEVTCVVVDVSHEDPEVKFNWYVDGVEVHNAKTKPREEQYASTYRVVSVLTVLHQDWLNGKEYKCKVSNKALPAPIEKTISKAKGQPREPQVYTLPPCRKELTKNQVSLWCLVKGFYPSDIAVEWESNGQPENNYKTTPPVLKSDGSFFLYSKLTVDKSRWQQGNVFSCSVMHEALHNHYTQKSLSLSPG

SEQ ID NO: 81 - protein, 226 aa, Artificial Sequence
  Fc
DKTHTCPPCPAPELLGGPSVFLFPPKPKDTLMISRTPEVTCVVVDVSHEDPEVKFNWYVDGVEVHNAKTKPREEQYASTYRVVSVLTVLHQDWLNGKEYKCKVSNKALPAPIEKTISKAKGQPREPQVCTLPPSRDELTKNQVSLSCAVKGFYPSDIAVEWESNGQPENNYDTTPPVLDSDGSFFLVSDLTVDKSRWQQGNVFSCSVMHEALHNHYTQKSLSLSPG

SEQ ID NO: 82 - protein, 226 aa, Artificial Sequence
  Fc
DKTHTCPPCPAPELLGGPSVFLFPPKPKDTLMISRTPEVTCVVVDVSHEDPEVKFNWYVDGVEVHNAKTKPREEQYASTYRVVSVLTVLHQDWLNGKEYKCKVSNKALPAPIEKTISKAKGQPREPQVYTLPPCRKKLTKNQVSLWCLVKGFYPSDIAVEWESNGQPENNYKTTPPVLDSDGSFFLYSKLTVDKSRWQQGNVFSCSVMHEALHNHYTQKSLSLSPG

SEQ ID NO: 83 - protein, 226 aa, Artificial Sequence
  Fc
DKTHTCPPCPAPELLGGPSVFLFPPKPKDTLMISRTPEVTCVVVDVSHEDPEVKFNWYVDGVEVHNAKTKPREEQYASTYRVVSVLTVLHQDWLNGKEYKCKVSNKALPAPIEKTISKAKGQPREPQVCTLPPSRDELTKNQVSLSCAVEGFYPSDIAVEWESNGQPENNYKTTPPVLDSDGSFFLVSKLTVDKSRWQQGNVFSCSVMHEALHNHYTQESLSLSPG

SEQ ID NO: 84 - protein, 227 aa, Artificial Sequence
  Fc
DKTHTCPPCPAPELLGGPSVFLFPPKPKDTLMISRTPEVTCVVVDVSHEDPEVKFNWYVDGVEVHNAKTKPREEQYASTYRVVSVLTVLHQDWLNGKEYKCKVSNKALPAPIEKTISKAKGQPREPQVYTLPPCRKKLTKNQVSLWCLVKGFYPSDIAVEWESNGQPENNYKTTPPVLDSDGSFFLYSKLTVDKSRWQQGNVFSCSVMHEALHNHYTQKSLSLSPGK

SEQ ID NO: 85 - protein, 376 aa, Artificial Sequence
  Polypeptide chain
DKTHTCPPCPAPELLGGPSVFLFPPKPKDTLMISRTPEVTCVVVDVSHEDPEVKFNWYVDGVEVHNAKTKPREEQYASTYRVVSVLTVLHQDWLNGKEYKCKVSNKALPAPIEKTISKAKGQPREPQVYTLPPCRDELTKNQVSLWCLVKGFYPSDIAVEWESNGQPENNYKTTPPVLDSDGSFFLYSKLTVDKSRWQQGNVFSCSVMHEALHNHYTQKSLSLSPGGGSSPPMPYDLYHPSGPAPTSSSTKKTQLQLEHLLLDLQMILNGINNYKNPKLTRMLTFKFYMPKKATELKHLQCLEEELKPLEEVLNLAQSKNFHLRPRDLISNINVIVLELKGSETTFMCEYADETATIVEFLNRWITFAQSIISTLT

SEQ ID NO: 86 - protein, 459 aa, Artificial Sequence
  Polypeptide chain
DKTHTCPPCPAPELLGGPSVFLFPPKPKDTLMISRTPEVTCVVVDVSHEDPEVKFNWYVDGVEVHNAKTKPREEQYASTYRVVSVLTVLHQDWLNGKEYKCKVSNKALPAPIEKTISKAKGQPREPQVYTLPPCRKELTKNQVSLWCLVKGFYPSDIAVEWESNGQPENNYKTTPPVLKSDGSFFLYSKLTVDKSRWQQGNVFSCSVMHEALHNHYTQKSLSLSPGGPPSGSSPMPYDLYHPSGGGAVNGTSQFTCFYNSRANISCVWSQDGALQDTSCQVHAWPDRRRWNQTCELLPVSQASWACNLILGAPDSQKLTTVDIVTLRVLCREGVRWRVMAIQDFKPFENLRLMAPISLQVVHVETHRCNISWEISQASHYFERHLEFEARTLSPGHTWEEAPLLTLKQKQEWICLETLTPDTQYEFQVRVKPLQGEFTTWSPWSQPLAFRTKPAALGKD

SEQ ID NO: 87 - protein, 359 aa, Artificial Sequence
  Polypeptide chain
DKTHTCPPCPAPELLGGPSVFLFPPKPKDTLMISRTPEVTCVVVDVSHEDPEVKFNWYVDGVEVHNAKTKPREEQYASTYRVVSVLTVLHQDWLNGKEYKCKVSNKALPAPIEKTISKAKGQPREPQVCTLPPSRDELTKNQVSLSCAVKGFYPSDIAVEWESNGQPENNYDTTPPVLDSDGSFFLVSDLTVDKSRWQQGNVFSCSVMHEALHNHYTQKSLSLSPGAPTSSSTKKTQLQLEHLLLDLQMILNGINNYKNPKLTRMLTFKFYMPKKATELKHLQCLEEELKPLEEVLNLAQSKNFHLRPRDLISNINVIVLELKGSETTFMCEYADETATIVEFLNRWITFAQSIISTLT

SEQ ID NO: 88 - protein, 459 aa, Artificial Sequence
  Polypeptide chain
DKTHTCPPCPAPELLGGPSVFLFPPKPKDTLMISRTPEVTCVVVDVSHEDPEVKFNWYVDGVEVHNAKTKPREEQYASTYRVVSVLTVLHQDWLNGKEYKCKVSNKALPAPIEKTISKAKGQPREPQVYTLPPCRKKLTKNQVSLWCLVKGFYPSDIAVEWESNGQPENNYKTTPPVLDSDGSFFLYSKLTVDKSRWQQGNVFSCSVMHEALHNHYTQKSLSLSPGGPPSGSSPMPYDLYHPSGGGAVNGTSQFTCFYNSRANISCVWSQDGALQDTSCQVHAWPDRRRWNQTCELLPVSQASWACNLILGAPDSQKLTTVDIVTLRVLCREGVRWRVMAIQDFKPFENLRLMAPISLQVVHVETHRCNISWEISQASHYFERHLEFEARTLSPGHTWEEAPLLTLKQKQEWICLETLTPDTQYEFQVRVKPLQGEFTTWSPWSQPLAFRTKPAALGKD

SEQ ID NO: 89 - protein, 359 aa, Artificial Sequence
  Polypeptide chain
DKTHTCPPCPAPELLGGPSVFLFPPKPKDTLMISRTPEVTCVVVDVSHEDPEVKFNWYVDGVEVHNAKTKPREEQYASTYRVVSVLTVLHQDWLNGKEYKCKVSNKALPAPIEKTISKAKGQPREPQVCTLPPSRDELTKNQVSLSCAVEGFYPSDIAVEWESNGQPENNYKTTPPVLDSDGSFFLVSKLTVDKSRWQQGNVFSCSVMHEALHNHYTQESLSLSPGAPTSSSTKKTQLQLEHLLLDLQMILNGINNYKNPKLTRMLTFKFYMPKKATELKHLQCLEEELKPLEEVLNLAQSKNFHLRPRDLISNINVIVLELKGSETTFMCEYADETATIVEFLNRWITFAQSIISTLT

SEQ ID NO: 90 - protein, 376 aa, Artificial Sequence
  Polypeptide chain
DKTHTCPPCPAPELLGGPSVFLFPPKPKDTLMISRTPEVTCVVVDVSHEDPEVKFNWYVDGVEVHNAKTKPREEQYASTYRVVSVLTVLHQDWLNGKEYKCKVSNKALPAPIEKTISKAKGQPREPQVCTLPPSRDELTKNQVSLSCAVEGFYPSDIAVEWESNGQPENNYKTTPPVLDSDGSFFLVSKLTVDKSRWQQGNVFSCSVMHEALHNHYTQESLSLSPGGGSSPPMPYDLYHPSGPAPTSSSTKKTQLQLEHLLLDLQMILNGINNYKNPKLTRMLTFKFYMPKKATELKHLQCLEEELKPLEEVLNLAQSKNFHLRPRDLISNINVIVLELKGSETTFMCEYADETATIVEFLNRWITFAQSIISTLT

SEQ ID NO: 91 - protein, 227 aa, Artificial Sequence; identical to SEQ ID NO: 84
  Polypeptide chain

SEQ ID NO: 92 - protein, 442 aa, Artificial Sequence
  Polypeptide chain
DKTHTCPPCPAPELLGGPSVFLFPPKPKDTLMISRTPEVTCVVVDVSHEDPEVKFNWYVDGVEVHNAKTKPREEQYASTYRVVSVLTVLHQDWLNGKEYKCKVSNKALPAPIEKTISKAKGQPREPQVYTLPPCRKKLTKNQVSLWCLVKGFYPSDIAVEWESNGQPENNYKTTPPVLDSDGSFFLYSKLTVDKSRWQQGNVFSCSVMHEALHNHYTQKSLSLSPGPGSGAVNGTSQFTCFYNSRANISCVWSQDGALQDTSCQVHAWPDRRRWNQTCELLPVSQASWACNLILGAPDSQKLTTVDIVTLRVLCREGVRWRVMAIQDFKPFENLRLMAPISLQWHVETHRCNISWEISQASHYFERHLEFEARTLSPGHTWEEAPLLTLKQKQEWICLETLTPDTQYEFQVRVKPLQGEFTTWSPWSQPLAFRTKPAALGKD

SEQ ID NO: 93 - protein, 376 aa, Artificial Sequence; identical to SEQ ID NO: 45
  Polypeptide chain

SEQ ID NO: 94 - protein, 376 aa, Artificial Sequence
  Polypeptide chain
DKTHTCPPCPAPELLGGPSVFLFPPKPKDTLMISRTPEVTCVVVDVSHEDPEVKFNWYVDGVEVHNAKTKPREEQYASTYRVVSVLTVLHQDWLNGKEYKCKVSNKALPAPIEKTISKAKGQPREPQVYTLPPCRDELTKNQVSLWCLVKGFYPSDIAVEWESNGQPENNYKTTPPVLDSDGSFFLYSKLTVDKSRWQQGNVFSCSVMHEALHNHYTQKSLSLSPGGGPGGPRAAAVKSPSGPAPTSSSTKKTQLQLEHLLLDLQMILNGINNYKNPKLTRMLTFKFYMPKKATELKHLQCLEEELKPLEEVLNLAQSKNFHLRPRDLISNINVIVLELKGSETTFMCEYADETATIVEFLNRWITFAQSIISTLT

SEQ ID NO: 95 - protein, 376 aa, Artificial Sequence
  Polypeptide chain
DKTHTCPPCPAPELLGGPSVFLFPPKPKDTLMISRTPEVTCVVVDVSHEDPEVKFNWYVDGVEVHNAKTKPREEQYASTYRVVSVLTVLHQDWLNGKEYKCKVSNKALPAPIEKTISKAKGQPREPQVYTLPPCRDELTKNQVSLWCLVKGFYPSDIAVEWESNGQPENNYKTTPPVLDSDGSFFLYSKLTVDKSRWQQGNVFSCSVMHEALHNHYTQKSLSLSPGGGSSPPRAAAVKSPSGPAPTSSSTKKTQLQLEHLLLDLQMILNGINNYKNPKLTAMLTAKFAMPKKATELKHLQCLEEALKPLEEVLNLAQSKNFHLRPRDLISNINVIVLELKGSETTFMCEYADETATIVEFLNRWITFAQSIISTLT

SEQ ID NO: 96 - protein, 376 aa, Artificial Sequence
  Polypeptide chain
DKTHTCPPCPAPELLGGPSVFLFPPKPKDTLMISRTPEVTCVVVDVSHEDPEVKFNWYVDGVEVHNAKTKPREEQYASTYRVVSVLTVLHQDWLNGKEYKCKVSNKALPAPIEKTISKAKGQPREPQVYTLPPCRDELTKNQVSLWCLVKGFYPSDIAVEWESNGQPENNYKTTPPVLDSDGSFFLYSKLTVDKSRWQQGNVFSCSVMHEALHNHYTQKSLSLSPGGGPGGPRAAAVKSPSGPAPTSSSTKKTQLQLEHLLLDLQMILNGINNYKNPKLTAMLTAKFAMPKKATELKHLQCLEEALKPLEEVLNLAQSKNFHLRPRDLISNINVIVLELKGSETTFMCEYADETATIVEFLNRWITFAQSIISTLT

SEQ ID NO: 97 - protein, 374 aa, Artificial Sequence
  Polypeptide chain
DKTHTCPPCPAPELLGGPSVFLFPPKPKDTLMISRTPEVTCVVVDVSHEDPEVKFNWYVDGVEVHNAKTKPREEQYASTYRVVSVLTVLHQDWLNGKEYKCKVSNKALPAPIEKTISKAKGQPREPQVYTLPPCRDELTKNQVSLWCLVKGFYPSDIAVEWESNGQPENNYKTTPPVLDSDGSFFLYSKLTVDKSRWQQGNVFSCSVMHEALHNHYTQKSLSLSPGGGSGRAAAVKSPSGPAPTSSSTKKTQLQLEHLLLDLQMILNGINNYKNPKLTRMLTFKFYMPKKATELKHLQCLEEELKPLEEVLNLAQSKNFHLRPRDLISNINVIVLELKGSETTFMCEYADETATIVEFLNRWITFAQSIISTLT

SEQ ID NO: 98 - protein, 376 aa, Artificial Sequence; identical to SEQ ID NO: 51
  Polypeptide chain

SEQ ID NO: 99 - protein, 376 aa, Artificial Sequence
  Polypeptide chain
DKTHTCPPCPAPELLGGPSVFLFPPKPKDTLMISRTPEVTCVVVDVSHEDPEVKFNWYVDGVEVHNAKTKPREEQYASTYRVVSVLTVLHQDWLNGKEYKCKVSNKALPAPIEKTISKAKGQPREPQVYTLPPCRDELTKNQVSLWCLVKGFYPSDIAVEWESNGQPENNYKTTPPVLDSDGSFFLYSKLTVDKSRWQQGNVFSCSVMHEALHNHYTQKSLSLSPGGGSSPPMPYDLYHPSGPAPTSSSTKKTQLQLEHLLLDLQMILNGINNYKNPKLTRMLTFKFYMPKKATELKHLQCLEERLKPLEEVLNLAQSKNFHLRPRDLISNINVIVLELKGSETTFMCEYADETATIVEFLNRWITFAQSIISTLT

SEQ ID NO: 100 - protein, 376 aa, Artificial Sequence
  Polypeptide chain
DKTHTCPPCPAPELLGGPSVFLFPPKPKDTLMISRTPEVTCVVVDVSHEDPEVKFNWYVDGVEVHNAKTKPREEQYASTYRVVSVLTVLHQDWLNGKEYKCKVSNKALPAPIEKTISKAKGQPREPQVYTLPPCRDELTKNQVSLWCLVKGFYPSDIAVEWESNGQPENNYKTTPPVLDSDGSFFLYSKLTVDKSRWQQGNVFSCSVMHEALHNHYTQKSLSLSPGGGSSPPMPYDLYHPSGPAPTSSSTKKTQLQLEHLLLDLQMILNGINNYKNPKLTRMLTEKFYMPKKATELKHLQCLEEELKPLEEVLNLAQSKNFHLRPRDLISNINVIVLELKGSETTFMCEYADETATIVEFLNRWITFAQSIISTLT

SEQ ID NO: 101 - protein, 376 aa, Artificial Sequence
  Polypeptide chain
DKTHTCPPCPAPELLGGPSVFLFPPKPKDTLMISRTPEVTCVVVDVSHEDPEVKFNWYVDGVEVHNAKTKPREEQYASTYRVVSVLTVLHQDWLNGKEYKCKVSNKALPAPIEKTISKAKGQPREPQVYTLPPCRDELTKNQVSLWCLVKGFYPSDIAVEWESNGQPENNYKTTPPVLDSDGSFFLYSKLTVDKSRWQQGNVFSCSVMHEALHNHYTQKSLSLSPGGGSSPPMPYDLYHPSGPAPTSSSTKKTQLQLEHLLLDLQMILNGINNYKNPKLTRMLTFKFYMPKKATELKHLQCLEESLKPLEEVLNLAQSKNFHLRPRDLISNINVIVLELKGSETTFMCEYADETATIVEFLNRWITFAQSIISTLT

SEQ ID NO: 102 - protein, 376 aa, Artificial Sequence
  Polypeptide chain
DKTHTCPPCPAPELLGGPSVFLFPPKPKDTLMISRTPEVTCVVVDVSHEDPEVKFNWYVDGVEVHNAKTKPREEQYASTYRVVSVLTVLHQDWLNGKEYKCKVSNKALPAPIEKTISKAKGQPREPQVYTLPPCRDELTKNQVSLWCLVKGFYPSDIAVEWESNGQPENNYKTTPPVLDSDGSFFLYSKLTVDKSRWQQGNVFSCSVMHEALHNHYTQKSLSLSPGGGSSPPMPYDLYHPSGPAPTSSSTKKTQLQLEHLLLDLQMILNGINNYKNPKLTRMLTAKFYMPKKATELKHLQCLEEELKPLEEVLNLAQSKNFHLRPRDLISNINVIVLELKGSETTFMCEYADETATIVEFLNRWITFAQSIISTLT

SEQ ID NO: 103 - protein, 376 aa, Artificial Sequence
  Polypeptide chain
DKTHTCPPCPAPELLGGPSVFLFPPKPKDTLMISRTPEVTCVVVDVSHEDPEVKFNWYVDGVEVHNAKTKPREEQYASTYRVVSVLTVLHQDWLNGKEYKCKVSNKALPAPIEKTISKAKGQPREPQVYTLPPCRDELTKNQVSLWCLVKGFYPSDIAVEWESNGQPENNYKTTPPVLDSDGSFFLYSKLTVDKSRWQQGNVFSCSVMHEALHNHYTQKSLSLSPGGGSSPPMPYDLYHPSGPAPTSSSTKKTQLQLEHLLLDLQMILNGINNYKNPKLTRMLTFKFRMPKKATELKHLQCLEEELKPLEEVLNLAQSKNFHLRPRDLISNINVIVLELKGSETTFMCEYADETATIVEFLNRWITFAQSIISTLT

SEQ ID NO: 104 - protein, 376 aa, Artificial Sequence
  Polypeptide chain
DKTHTCPPCPAPELLGGPSVFLFPPKPKDTLMISRTPEVTCVVVDVSHEDPEVKFNWYVDGVEVHNAKTKPREEQYASTYRVVSVLTVLHQDWLNGKEYKCKVSNKALPAPIEKTISKAKGQPREPQVYTLPPCRDELTKNQVSLWCLVKGFYPSDIAVEWESNGQPENNYKTTPPVLDSDGSFFLYSKLTVDKSRWQQGNVFSCSVMHEALHNHYTQKSLSLSPGGGSSPPMPYDLYHPSGPAPTSSSTKKTQLQLEHLLLDLQMILNGINNYKNPKLTRMLTSKFYMPKKATELKHLQCLFFSLKPLFEVLNLAQSKNFHLRPRDLISNINVIVLELKGSFTTFMCEYADETATIVEFLNRWITFAQSIISTLT

SEQ ID NO: 105 - protein, 372 aa, Artificial Sequence
  Polypeptide chain
DKTHTCPPCPAPELLGGPSVFLFPPKPKDTLMISRTPEVTCVVVDVSHEDPEVKFNWYVDGVEVHNAKTKPREEQYASTYRVVSVLTVLHQDWLNGKEYKCKVSNKALPAPIEKTISKAKGQPREPQVYTLPPCRDELTKNQVSLWCLVKGFYPSDIAVEWESNGQPENNYKTTPPVLDSDGSFFLYSKLTVDKSRWQQGNVFSCSVMHEALHNHYTQKSLSLSPGGSPGVPLSLYSGPAPTSSSTKKTQLQLEHLLLDLQMILNGINNYKNPKLTRMLTFKFYMPKKATELKHLQCLEERLKPLEEVLNLAQSKNFHLRPRDLISNINVIVLELKGSETTFMCEYADETATIVEFLNRWITFAQSIISTLT

SEQ ID NO: 106 - protein, 372 aa, Artificial Sequence
  Polypeptide chain
DKTHTCPPCPAPELLGGPSVFLFPPKPKDTLMISRTPEVTCVVVDVSHEDPEVKFNWYVDGVEVHNAKTKPREEQYASTYRVVSVLTVLHQDWLNGKEYKCKVSNKALPAPIEKTISKAKGQPREPQVYTLPPCRDELTKNQVSLWCLVKGFYPSDIAVEWESNGQPENNYKTTPPVLDSDGSFFLYSKLTVDKSRWQQGNVFSCSVMHEALHNHYTQKSLSLSPGGSPGVPLSLYSGPAPTSSSTKKTQLQLEHLLLDLQMILNGINNYKNPKLTRMLTEKFYMPKKATELKHLQCLEEELKPLEEVLNLAQSKNFHLRPRDLISNINVIVLELKGSETTFMCEYADETATIVEFLNRWITFAQSIISTLT

SEQ ID NO: 107 - protein, 372 aa, Artificial Sequence
  Polypeptide chain
DKTHTCPPCPAPELLGGPSVFLFPPKPKDTLMISRTPEVTCVVVDVSHEDPEVKFNWYVDGVEVHNAKTKPREEQYASTYRVVSVLTVLHQDWLNGKEYKCKVSNKALPAPIEKTISKAKGQPREPQVYTLPPCRDELTKNQVSLWCLVKGFYPSDIAVEWESNGQPENNYKTTPPVLDSDGSFFLYSKLTVDKSRWQQGNVFSCSVMHEALHNHYTQKSLSLSPGGSPGVPLSLYSGPAPTSSSTKKTQLQLEHLLLDLQMILNGINNYKNPKLTRMLTFKFYMPKKATELKHLQCLEESLKPLEEVLNLAQSKNFHLRPRDLISNINVIVLELKGSETTFMCEYADETATIVEFLNRWITFAQSIISTLT

SEQ ID NO: 108 - protein, 372 aa, Artificial Sequence
  Polypeptide chain
DKTHTCPPCPAPELLGGPSVFLFPPKPKDTLMISRTPEVTCVVVDVSHEDPEVKFNWYVDGVEVHNAKTKPREEQYASTYRVVSVLTVLHQDWLNGKEYKCKVSNKALPAPIEKTISKAKGQPREPQVYTLPPCRDELTKNQVSLWCLVKGFYPSDIAVEWESNGQPENNYKTTPPVLDSDGSFFLYSKLTVDKSRWQQGNVFSCSVMHEALHNHYTQKSLSLSPGGSPGVPLSLYSGPAPTSSSTKKTQLQLEHLLLDLQMILNGINNYKNPKLTRMLTAKFYMPKKATELKHLQCLEEELKPLEEVLNLAQSKNFHLRPRDLISNINVIVLELKGSETTFMCEYADETATIVEFLNRWITFAQSIISTLT

SEQ ID NO: 109 - protein, 372 aa, Artificial Sequence
  Polypeptide chain
DKTHTCPPCPAPELLGGPSVFLFPPKPKDTLMISRTPEVTCVVVDVSHEDPEVKFNWYVDGVEVHNAKTKPREEQYASTYRVVSVLTVLHQDWLNGKEYKCKVSNKALPAPIEKTISKAKGQPREPQVYTLPPCRDELTKNQVSLWCLVKGFYPSDIAVEWESNGQPENNYKTTPPVLDSDGSFFLYSKLTVDKSRWQQGNVFSCSVMHEALHNHYTQKSLSLSPGGSPGVPLSLYSGPAPTSSSTKKTQLQLEHLLLDLQMILNGINNYKNPKLTRMLTFKFRMPKKATELKHLQCLEEELKPLEEVLNLAQSKNFHLRPRDLISNINVIVLELKGSETTFMCEYADETATIVEFLNRWITFAQSIISTLT

SEQ ID NO: 110 - protein, 372 aa, Artificial Sequence
  Polypeptide chain
DKTHTCPPCPAPELLGGPSVFLFPPKPKDTLMISRTPEVTCVVVDVSHEDPEVKFNWYVDGVEVHNAKTKPREEQYASTYRVVSVLTVLHQDWLNGKEYKCKVSNKALPAPIEKTISKAKGQPREPQVYTLPPCRDELTKNQVSLWCLVKGFYPSDIAVEWESNGQPENNYKTTPPVLDSDGSFFLYSKLTVDKSRWQQGNVFSCSVMHEALHNHYTQKSLSLSPGGSPGVPLSLYSGPAPTSSSTKKTQLQLEHLLLDLQMILNGINNYKNPKLTRMLTSKFYMPKKATELKHLQCLEESLKPLEEVLNLAQSKNFHLRPRDLISNINVIVLELKGSETTFMCEYADETATFVEFLNRWITFAQSIISTLT

SEQ ID NO: 111 - protein, 372 aa, Artificial Sequence
  Polypeptide chain
DKTHTCPPCPAPELLGGPSVFLFPPKPKDTLMISRTPEVTCVVVDVSHEDPEVKFNWYVDGVEVHNAKTKPREEQYASTYRVVSVLTVLHQDWLNGKEYKCKVSNKALPAPIEKTISKAKGQPREPQVYTLPPCRDELTKNQVSLWCLVKGFYPSDIAVEWESNGQPENNYKTTPPVLDSDGSFFLYSKLTVDKSRWQQGNVFSCSVMHEALHNHYTQKSLSLSPGGSPGVPLSLYSGPAPTSSSTKKTQLQLEHLLLDLQMILNGINNYKNPKLTRMLTFKFYMPKKATELKHLQCLEEELKPLEEVLNLAQSKNFHLRPRDLISNINVIVLELKGSETTFMCEYADETATIVEFLNRWITFAQSIISTLT

SEQ ID NO: 112 - protein, 25 aa, Artificial Sequence
  Linker
GGSSGGSPISSGLLSGRSSGPGSGS

SEQ ID NO: 113 - protein, 22 aa, Artificial Sequence
  Linker
GPPSGSSPISSGLLSGRSSGGG

SEQ ID NO: 114 - protein, 19 aa, Artificial Sequence
  Linker
GGSGGSISSGLLSGRSSGP

SEQ ID NO: 115 - protein, 22 aa, Artificial Sequence
  Linker
GGSGGSGGSISSGLLSGRSSGP

SEQ ID NO: 116 - protein, 15 aa, Artificial Sequence
  Linker
GGGGSGGGGSGGGGS

SEQ ID NO: 117 - protein, 10 aa, Artificial Sequence
  Cytokine fragment
KSKREKKDRV

SEQ ID NO: 118 - protein, 18 aa, Artificial Sequence
  Linker
SGSDLLAVVAASSGPGSG

SEQ ID NO: 119 - protein, 23 aa, Artificial Sequence
  Linker
SGSPSGDLLAVVAASSGPGSGSP

SEQ ID NO: 120 - protein, 18 aa, Artificial Sequence
  Linker
GGSGISSGLLSGRSSSGP

SEQ ID NO: 121 - protein, 15 aa, Artificial Sequence
  Linker
GISSGLLSGRSSSGP

SEQ ID NO: 122 - protein, 328 aa, Artificial Sequence
  Cytokine
MCHQQLVISWFSLVFLASPLVAIWELKKDVYVVELDWYPDAPGEMVVLTCDTPEEDGITWTLDQSSEVLGSGKTLTIQVKEFGDAGQYTCHKGGEVLSHSLLLLHKKEDGIWSTDILKDQKEPKNKTFLRCEAKNYSGRFTCWWLTTISTDLTFSVKSSRGSSDPQGVTCGAATLSAERVRGDNKEYEYSVECQEDSACPAAEESLPIEVMVDAVHKLKYENYTSSFFIRDIIKPDPPKNLQLKPLKNSRQVEVSWEYPDTWSTPHSYFSLTFCVQVQGKSKREKKDRVFTDKTSATVICRKNASISVRAQDRYYSSSWSEWASVPCS

SEQ ID NO: 123 - protein, 219 aa, Artificial Sequence
  Cytokine
MCPARSLLLVATLVLLDHLSLARNLPVATPDPGMFPCLHHSQNLLRAVSNMLQKARQTLEFYPCTSEEIDHEDITKDKTSTVEACLPLELTKNESCLNSRETSFITNGSCLASRKTSFMMALCLSSIYEDLKMYQVEFKTMNAKLLMDPKRQIFLDQNMLAVIDELMQALNFNSETVPQKSSLEEPDFYKTKIKLCILLHAFRIRAVTIDRVMSYLNAS

SEQ ID NO: 124 - protein, 306 aa, Artificial Sequence
  Cytokine
IWELKKDVYVVELDWYPDAPGEMVVLTCDTPEEDGITWTLDQSSEVLGSGKTLTIQVKEFGDAGQYTCHKGGEVLSHSLLLLHKKEDGIWSTDILKDQKEPKNKTFLRCEAKNYSGRFTCWWLTTISTDLTFSVKSSRGSSDPQGVTCGAATLSAERVRGDNKEYEYSVECQEDSACPAAEESLPIEVMVDAVHKLKYENYTSSFFIRDIIKPDPPKNLQLKPLKNSRQVEVSWEYPDTWSTPHSYFSLTFCVQVQGKSKREKKDRVFTDKTSATVICRKNASISVRAQDRYYSSSWSEWASVPCS

SEQ ID NO: 125 - protein, 197 aa, Artificial Sequence
  Cytokine
RNLPVATPDPGMFPCLHHSQNLLRAVSNMLQKARQTLEFYPCTSEEIDHEDITKDKTSTVEACLPLELTKNESCLNSRETSFITNGSCLASRKTSFMMALCLSSIYEDLKMYQVEFKTMNAKLLMDPKRQIFLDQNMLAVIDELMQALNFNSETVPQKSSLEEPDFYKTKIKLCILLHAFRIRAVTIDRVMSYLNAS

SEQ ID NO: 126 - protein, 7 aa, Artificial Sequence
  Cytokine fragment
KDNTERV

SEQ ID NO: 127 - protein, 8 aa, Artificial Sequence
  Cytokine fragment
KDNTEGRV

SEQ ID NO: 128 - protein, 662 aa, Artificial Sequence
  Masking moiety
MEPLVTWVVPLLFLFLLSRQGAACRTSECCFQDPPYPDADSGSASGPRDLRCYRISSDRYECSWQYEGPTAGVSHFLRCCLSSGRCCYFAAGSATRLQFSDQAGVSVLYTVTLWVESWARNQTEKSPEVTLQLYNSVKYEPPLGDIKVSKLAGQLRMEWETPDNQVGAEVQFRHRTPSSPWKLGDCGPQDDDTESCLCPLEMNVAQEFQLRRRQLGSQGSSWSKWSSPVCVPPENPPQPQVRFSVEQLGQDGRRRLTLKEQPTQLELPEGCQGLAPGTEVTYRLQLHMLSCPCKAKATRTLHLGKMPYLSGAAYNVAVISSNQFGPGLNQTWHIPADTHTEPVALNISVGTNGTTMYWPARAQSMTYCIEWQPVGQDGGLATCSLTAPQDPDPAGMATYSWSRESGAMGQEKCYYITIFASAHPEKLTLWSTVLSTYHFGGNASAAGTPHHVSVKNHSLDSVSVDWAPSLLSTCPGVLKEYVVRCRDEDSKQVSEHPVQPTETQVTLSGLRAGVAYTVQVRADTAWLRGVWSQPQRFSIEVQVSDWLIFFASLGSFLSILLVGVLGYLGLNRAARHLCPPLPTPCASSAIEFPGGKETWQWINPVDFQEEASLQEALVVEMSWDKGERTEPLEKTELPEGAPELALDTELSLEDGDRCKAKM

SEQ ID NO: 129 - protein, 862 aa, Artificial Sequence
  Masking moiety
MAHTFRGCSLAFMFIITWLLIKAKIDACKRGDVTVKPSHVILLGSTVNITCSLKPRQGCFHYSRRNKLILYKFDRRINFHHGHSLNSQVTGLPLGTTLFVCKLACINSDEIQICGAEIFVGVAPEQPQNLSCIQKGEQGTVACTWERGRDTHLYTEYTLQLSGPKNLTWQKQCKDIYCDYLDFGINLTPESPESNFTAKVTAVNSLGSSSSLPSTFTFLDIVRPLPPWDIRIKFQKASVSRCTLYWRDEGLVLLNRLRYRPSNSRLWNMVNVTKAKGRHDLLDLKPFTEYEFQISSKLHLYKGSWSDWSESLRAQTPEEEPTGMLDVWYMKRHIDYSRQQISLFWKNLSVSEARGKILHYQVTLQELTGGKAMTQNITGHTSWTTVIPRTGNWAVAVSAANSKGSSLPTRINIMNLCEAGLLAPRQVSANSEGMDNILVTWQPPRKDPSAVQEYVVEWRELHPGGDTQVPLNWLRSRPYNVSALISENIKSYICYEIRVYALSGDQGGCSSILGNSKHKAPLSGPHINAITEEKGSILISWNSIPVQEQMGCLLHYRIYWKERDSNSQPQLCEIPYRVSQNSHPINSLQPRVTYVLWMTALTAAGESSHGNEREFCLQGKANWMAFVAPSICIAIIMVGIFSTHYFQQKVFVLLAALRPQWCSREIPDPANSTCAKKYPIAEEKTQLPLDRLLIDWPTPEDPEPLVISEVLHQVTPVFRHPPCSNWPQREKGIQGHQASEKDMMHSASSPPPPRALQAESRQLVDLYKVLESRGSDPKPENPACPWTVLPAGDLPTHDGYLPSNIDDLPSHEAPLADSLEELEPQHISLSVFPSSSLHPLTFSCGDKLTLDQLKMRCDSLML

SEQ ID NO: 130 - protein, 162 aa, Artificial Sequence
  Cytokine
MRISKPHLRSISIQCYLCLLLNSHFLTEAGIHVFILGCFSAGLPKTEANWVNVISDLKKIEDLIQSMHIDATLYTESDVHPSCKVTAMKCFLLELQVISLESGDASIHDTVENLIILANNSLSSNGNVTESGCKECEELEEKNIKEFLQSFVHIVQMFINTS

SEQ ID NO: 131 - protein, 114 aa, Artificial Sequence
  Cytokine
NWVNVISDLKKIEDLIQSMHIDATLYTESDVHPSCKVTAMKCFLLELQVISLESGDASIHDTVENLIILANNSLSSNGNVTESGCKECEELEEKNIKEFLQSFVHIVQMFINTS

SEQ ID NO: 132 - protein, 267 aa, Artificial Sequence
  Alpha domain
MAPRRARGCRTLGLPALLLLLLLRPPATRGITCPPPMSVEHADIWVKSYSLYSRERYICNSGFKRKAGTSSLTECVLNKATNVAHWTTPSLKCIRDPALVHQRPAPPSTVTTAGVTPQPESLSPSGKEPAASSPSSNNTAATTAAIVPGSQLMPSKSPSTGTTEISSHESSHGTPSQTTAKNWELTASASHQPPGVYPQGHSDTTVAISTSTVLLCGLSAVSLLACYLKSRQTPPLASVEMEAMEALPVTWGTSSRDEDLENCSHHL

SEQ ID NO: 133 - protein, 30 aa, Artificial Sequence
  Alpha domain fragment
MAPRRARGCRTLGLPALLLLLLLRPPATRG

SEQ ID NO: 134 - protein, 175 aa, Artificial Sequence
  Alpha domain fragment
ITCPPPMSVEHADIWVKSYSLYSRERYICNSGFKRKAGTSSLTECVLNKATNVAHWTTPSLKCIRDPALVHQRPAPPSTVTTAGVTPQPESLSPSGKEPAASSPSSNNTAATTAAIVPGSQLMPSKSPSTGTTEISSHESSHGTPSQTTAKNWELTASASHQPPGVYPQGHSDTT

SEQ ID NO: 135 - protein, 23 aa, Artificial Sequence
  Alpha domain fragment
VAISTSTVLLCGLSAVSLLACYL

SEQ ID NO: 136 - protein, 39 aa, Artificial Sequence
  Alpha domain fragment
KSRQTPPLASVEMEAMEALPVTWGTSSRDEDLENCSHHL

SEQ ID NO: 137 - protein, 66 aa, Artificial Sequence
  Alpha domain
ITCPPPMSVEHADIWVKSYSLYSRERYICNSGFKRKAGTSSLTECVLNKATNVAHWTTPSLKCIRD

SEQ ID NO: 138 - protein, 66 aa, Artificial Sequence
  Alpha domain
ITCPPPMSVEHADIWVKSYSLYSRENYICNSGFKRKAGTSSLTECVLNKATNVAHWTTPSLKCIRD

SEQ ID NO: 139 - protein, 66 aa, Artificial Sequence
  Alpha domain
ITCPPPMSVEHADIWVKSYSLYSRERYICNSGFKQKAGTSSLTECVLNKATNVAHWTTPSLKCIRD

SEQ ID NO: 140 - protein, 66 aa, Artificial Sequence
  Alpha domain
ITCPPPMSVEHADIWVKSYSLYSRESYICNSGFKRKAGTSSLTECVLNKATNVAHWTTPSLKCIRD

SEQ ID NO: 141 - protein, 66 aa, Artificial Sequence
  Alpha domain
ITCPPPMSVEHADIWVKSYSLYSRERYICNSGFKSKAGTSSLTECVLNKATNVAHWTTPSLKCIRD

SEQ ID NO: 142 - protein, 66 aa, Artificial Sequence
  Alpha domain
ITCPPPMSVEHADIWVKSYSLYSRENYICNSGFKQKAGTSSLTECVLNKATNVAHWTTPSLKCIRD

SEQ ID NO: 143 - protein, 77 aa, Artificial Sequence
  Alpha domain
ITCPPPMSVEHADIWVKSYSLYSRERYICNSGFKRKAGTSSLTECVLNKATNVAHWTTPSLKCIRDPALVHQRPAPP

SEQ ID NO: 144 - protein, 102 aa, Artificial Sequence
  Alpha domain
ITCPPPMSVEHADIWVKSYSLYSRERYICNSGFKRKAGTSSLTECVLNKATNVAHWTTPSLKCIRDPALVHQRPAPPSTVTTAGVTPQPESLSPSGKEPAAS

SEQ ID NO: 145 - protein, 16 aa, Artificial Sequence
  Linker
RSGVPLSLYSGSGGGK

SEQ ID NO: 146 - protein, 14 aa, Artificial Sequence
  Linker
RSGMPYDLYHPSGK

SEQ ID NO: 147 - protein, 14 aa, Artificial Sequence
  Linker
RGPDSGGFMLTSGK

SEQ ID NO: 148 - protein, 15 aa, Artificial Sequence
  Linker
RGSGHEQLTVSGGSK

SEQ ID NO: 149 - protein, 14 aa, Artificial Sequence
  Linker
RSGRAAAVKSPSGK

SEQ ID NO: 150 - protein, 20 aa, Artificial Sequence
  Linker
RGSGISSGLLSGRSDNHSGK

SEQ ID NO: 151 - protein, 14 aa, Artificial Sequence
  Linker
RGDLLAVVAASGGK

SEQ ID NO: 152 - protein, 15 aa, Artificial Sequence
  Linker
RGGISSGLLSGRSGK

SEQ ID NO: 153 - protein, 227 aa, Artificial Sequence; identical to SEQ ID NO: 79
  Polypeptide chain

SEQ ID NO: 154 - protein, 362 aa, Artificial Sequence
  Polypeptide chain
DKTHTCPPCPAPELLGGPSVFLFPPKPKDTLMISRTPEVTCVVVDVSHEDPEVKFNWYVDGVEVHNAKTKPREEQYASTYRVVSVLTVLHQDWLNGKEYKCKVSNKALPAPIEKTISKAKGQPREPQVYTLPPCRDELTKNQVSLWCLVKGFYPSDIAVEWESNGQPENNYKTTPPVLDSDGSFFLYSKLTVDKSRWQQGNVFSCSVMHEALHNHYTQKSLSLSPGGGSSPPGGGSSGGGSGPSGSPGNWVNVISDLKKIEDLIQSMHIDATLYTESDVHPSCKVTAMKCFLLELQVISLESGDASIHDTVENLIILAQNSLSSNGQVTESGCKECEELEEKNIKEFLQSFVHIVQMFINTS

SEQ ID NO: 155 - protein, 444 aa, Artificial Sequence; identical to SEQ ID NO: 39
  Polypeptide chain

SEQ ID NO: 156 - protein, 362 aa, Artificial Sequence; identical to SEQ ID NO: 154
  Polypeptide chain

SEQ ID NO: 157 - protein, 444 aa, Artificial Sequence; identical to SEQ ID NO: 39
  Polypeptide chain

SEQ ID NO: 158 - protein, 358 aa, Artificial Sequence
  Polypeptide chain
DKTHTCPPCPAPELLGGPSVFLFPPKPKDTLMISRTPEVTCVVVDVSHEDPEVKFNWYVDGVEVHNAKTKPREEQYASTYRVVSVLTVLHQDWLNGKEYKCKVSNKALPAPIEKTISKAKGQPREPQVYTLPPCRDELTKNQVSLWCLVKGFYPSDIAVEWESNGQPENNYKTTPPVLDSDGSFFLYSKLTVDKSRWQQGNVFSCSVMHEALHNHYTQKSLSLSPGSGSDLLAVVAASSGPGSGNWVNVISDLKKIEDLIQSMHIDATLYTESDVHPSCKVTAMKCFLLELQVISLESGDASIHDTVENLIILAQNSLSSNGQVTESGCKECEELEEKNIKEFLQSFVHIVQMFINTS

SEQ ID NO: 159 - protein, 462 aa, Artificial Sequence
  Polypeptide chain
DKTHTCPPCPAPELLGGPSVFLFPPKPKDTLMISRTPEVTCVVVDVSHEDPEVKFNWYVDGVEVHNAKTKPREEQYASTYRVVSVLTVLHQDWLNGKEYKCKVSNKALPAPIEKTISKAKGQPREPQVCTLPPSRDELTKNQVSLSCAVKGFYPSDIAVEWESNGQPENNYKTTPPVLDSDGSFFLVSKLTVDKSRWQQGNVFSCSVMHEALHNHYTQKSLSLSPGSGSPSGDLLAVVAASSGPGSGSPAVNGTSQFTCFYNSRANISCVWSQDGALQDTSCQVHAWPDRRRWNQTCELLPVSQASWACNLILGAPDSQKLTTVDIVTLRVLCREGVRWRVMAIQDFKPFENLRLMAPISLQVVHVETHRSNISWEISQASHYFERHLEFEARTLSPGHTWEEAPLLTLKQKQEWISLETLTPDTQYEFQVRVKPLQGEFTTWSPWSQPLAFRTKPAALGKD

SEQ ID NO: 160 - protein, 362 aa, Artificial Sequence; identical to SEQ ID NO: 154
  Polypeptide chain

SEQ ID NO: 161 - protein, 444 aa, Artificial Sequence; identical to SEQ ID NO: 39
  Polypeptide chain

SEQ ID NO: 162 - protein, 365 aa, Artificial Sequence
  Polypeptide chain
DKTHTCPPCPAPELLGGPSVFLFPPKPKDTLMISRTPEVTCVVVDVSHEDPEVKFNWYVDGVEVHNAKTKPREEQYASTYRVVSVLTVLHQDWLNGKEYKCKVSNKALPAPIEKTISKAKGQPREPQVYTLPPCRDELTKNQVSLWCLVKGFYPSDIAVEWESNGQPENNYKTTPPVLDSDGSFFLYSKLTVDKSRWQQGNVFSCSVMHEALHNHYTQKSLSLSPGGGSSGGSPISSGLLSGRSSGPGSGSNWVNVISDLKKIEDLIQSMHIDATLYTESDVHPSCKVTAMKCFLLELQVISLESGDASIHDTVENLIILAQNSLSSNGQVTESGCKECEELEEKNIKEFLQSFVHIVQMFINTS

SEQ ID NO: 163 - protein, 461 aa, Artificial Sequence
  Polypeptide chain
DKTHTCPPCPAPELLGGPSVFLFPPKPKDTLMISRTPEVTCVVVDVSHEDPEVKFNWYVDGVEVHNAKTKPREEQYASTYRVVSVLTVLHQDWLNGKEYKCKVSNKALPAPIEKTISKAKGQPREPQVCTLPPSRDELTKNQVSLSCAVKGFYPSDIAVEWESNGQPENNYKTTPPVLDSDGSFFLVSKLTVDKSRWQQGNVFSCSVMHEALHNHYTQKSLSLSPGGPPSGSSPISSGLLSGRSSGGGAVNGTSQFTCFYNSRANISCVWSQDGALQDTSCQVHAWPDRRRWNQTCELLPVSQASWACNLILGAPDSQKLTTVDIVTLRVLCREGVRWRVMAIQDFKPFENLRLMAPISLQVVHVETHRSNISWEISQASHYFERHLEFEARTLSPGHTWEEAPLLTLKQKQEWISLETLTPDTQYEFQVRVKPLQGEFTTWSPWSQPLAFRTKPAALGKD

SEQ ID NO: 164 - protein, 362 aa, Artificial Sequence; identical to SEQ ID NO: 154
  Polypeptide chain

SEQ ID NO: 165 - protein, 6 aa, Artificial Sequence
  Linker
GGSGGS

SEQ ID NO: 166 - protein, 9 aa, Artificial Sequence
  Linker
GGSGGSGGS

SEQ ID NO: 167 - protein, 6 aa, Artificial Sequence
  Linker
PGGSGP

SEQ ID NO: 168 - protein, 5 aa, Artificial Sequence
  Linker
GGSPG

SEQ ID NO: 169 - protein, 8 aa, Artificial Sequence
  Linker
GGSGGGSG

SEQ ID NO: 170 - protein, 227 aa, Artificial Sequence; identical to SEQ ID NO: 79
  Polypeptide chain

SEQ ID NO: 171 - protein, 760 aa, Artificial Sequence
  Polypeptide chain
DKTHTCPPCPAPELLGGPSVFLFPPKPKDTLMISRTPEVTCVVVDVSHEDPEVKFNWYVDGVEVHNAKTKPREEQYASTYRVVSVLTVLHQDWLNGKEYKCKVSNKALPAPIEKTISKAKGQPREPQVYTLPPCRDELTKNQVSLWCLVKGFYPSDIAVEWESNGQPENNYKTTPPVLDSDGSFFLYSKLTVDKSRWQQGNVFSCSVMHEALHNHYTQKSLSLSPGGGSGGSGGSGGSGGSSGPIWELKKDVYVVELDWYPDAPGEMVVLTCDTPEEDGITWTLDQSSEVLGSGKTLTIQVKEFGDAGQYTCHKGGEVLSHSLLLLHKKEDGIWSTDILKDQKEPKNKTFLRCEAKNYSGRFTCWWLTTISTDLTFSVKSSRGSSDPQGVTCGAATLSAERVRGDNKEYEYSVECQEDSACPAAEESLPIEVMVDAVHKLKYENYTSSFFIRDIIKPDPPKNLQLKPLKNSRQVEVSWEYPDTWSTPHSYFSLTFSVQVQGKDNTEGRVFTDKTSATVICRKNASISVRAQDRYYSSSWSEWASVPCSGGGGSGGGGSGGGGSRNLPVATPDPGMFPCLHHSQNLLRAVSNMLQKARQTLEFYPCTSEEIDHEDITKDKTSTVEACLPLELTKNESCLNSRETSFITNGSCLASRKTSFMMALCLSSIYEDLKMYQVEFKTMNAKLLMDPKRQIFLDQNMLAVIDELMQALNFNSETVPQKSSLEEPDFYKTKIKLCILLHAFRIRAVTIDRVMSYLNAS

SEQ ID NO: 172 - protein, 527 aa, Artificial Sequence
  Polypeptide chain
DKTHTCPPCPAPELLGGPSVFLFPPKPKDTLMISRTPEVTCVVVDVSHEDPEVKFNWYVDGVEVHNAKTKPREEQYASTYRVVSVLTVLHQDWLNGKEYKCKVSNKALPAPIEKTISKAKGQPREPQVCTLPPSRDELTKNQVSLSCAVKGFYPSDIAVEWESNGQPENNYKTTPPVLDSDGSFFLVSKLTVDKSRWQQGNVFSCSVMHEALHNHYTQKSLSLSPGGGSPGKIDACKRGDVTVKPSHVILLGSTVNITCSLKPRQGCFHYSRRNKLILYKFDRRINFHHGHSLNSQVTGLPLGTTLFVCKLACINSDEIQICGAEIFVGVAPEQPQNLSCIQKGEQGTVACTWERGRDTHLYTEYTLQLSGPKNLTWQKQCKDIYCDYLDFGINLTPESPESNFTAKVTAVNSLGSSSSLPSTFTFLDIVRPLPPWDIRIKFQKASVSRSTLYWRDEGLVLLNRLRYRPSNSRLWNMVNVTKAKGRHDLLDLKPFTEYEFQISSKLHLYKGSWSDWSESLRAQTPEE

SEQ ID NO: 173 - protein, 227 aa, Artificial Sequence
  Polypeptide chain
DKTHTCPPCPAPELLGGPSVFLFPPKPKDTLMISRTPEVTCVVVDVSHEDPEVKFNWYVDGVEVHNAKTKPREEQYASTYRVVSVLTVLHQDWLNGKEYKCKVSNKALPAPIEKTISKAKGQPREPQVYTLPPCRDELTKNQVSLWCLVKGFYPSDIAVEWESNGQPENNYKTTPPVLDSDGSFFLYSKLTVDKSRWQQGNVFSCSVMHEALHNHYTQKSLSLSPGK

SEQ ID NO: 174 - protein, 527 aa, Artificial Sequence; identical to SEQ ID NO: 172
  Polypeptide chain

SEQ ID NO: 175 - protein, 760 aa, Artificial Sequence; identical to SEQ ID NO: 171
  Polypeptide chain

SEQ ID NO: 176 - protein, 527 aa, Artificial Sequence; identical to SEQ ID NO: 172
  Polypeptide chain

SEQ ID NO: 177 - protein, 760 aa, Artificial Sequence
  Polypeptide chain
DKTHTCPPCPAPELLGGPSVFLFPPKPKDTLMISRTPEVTCVVVDVSHEDPEVKFNWYVDGVEVHNAKTKPREEQYASTYRVVSVLTVLHQDWLNGKEYKCKVSNKALPAPIEKTISKAKGQPREPQVYTLPPCRDELTKNQVSLWCLVKGFYPSDIAVEWESNGQPENNYKTTPPVLDSDGSFFLYSKLTVDKSRWQQGNVFSCSVMHEALHNHYTQKSLSLSPGGGSGGSGGSVPLSLYSGPIWELKKDVYVVELDWYPDAPGEMVVLTCDTPEEDGITWTLDQSSEVLGSGKTLTIQVKEFGDAGQYTCHKGGEVLSHSLLLLHKKEDGIWSTDILKDQKEPKNKTFLRCEAKNYSGRFTCWWLTTISTDLTFSVKSSRGSSDPQGVTCGAATLSAERVRGDNKEYEYSVECQEDSACPAAEESLPIEVMVDAVHKLKYENYTSSFFIRDIIKPDPPKNLQLKPLKNSRQVEVSWEYPDTWSTPHSYFSLTFSVQVQGKDNTEGRVFTDKTSATVICRKNASISVRAQDRYYSSSWSEWASVPCSGGGGSGGGGSGGGGSRNLPVATPDPGMFPCLHHSQNLLRAVSNMLQKARQTLEFYPCTSEEIDHEDITKDKTSTVEACLPLELTKNESCLNSRETSFITNGSCLASRKTSFMMALCLSSIYEDLKMYQVEFKTMNAKLLMDPKRQIFLDQNMLAVIDELMQALNFNSETVPQKSSLEEPDFYKTKIKLCILLHAFRIRAVTIDRVMSYLNAS

SEQ ID NO: 178 - protein, 528 aa, Artificial Sequence
  Polypeptide chain
DKTHTCPPCPAPELLGGPSVFLFPPKPKDTLMISRTPEVTCVVVDVSHEDPEVKFNWYVDGVEVHNAKTKPREEQYASTYRVVSVLTVLHQDWLNGKEYKCKVSNKALPAPIEKTISKAKGQPREPQVCTLPPSRDELTKNQVSLSCAVKGFYPSDIAVEWESNGQPENNYKTTPPVLDSDGSFFLVSKLTVDKSRWQQGNVFSCSVMHEALHNHYTQKSLSLSPGPGGSGPKIDACKRGDVTVKPSHVILLGSTVNITCSLKPRQGCFHYSRRNKLILYKFDRRINFHHGHSLNSQVTGLPLGTTLFVCKLACINSDEIQICGAEIFVGVAPEQPQNLSCIQKGEQGTVACTWERGRDTHLYTEYTLQLSGPKNLTWQKQCKDIYCDYLDFGINLTPESPESNFTAKVTAVNSLGSSSSLPSTFTFLDIVRPLPPWDIRIKFQKASVSRSTLYWRDEGLVLLNRLRYRPSNSRLWNMVNVTKAKGRHDLLDLKPFTEYEFQISSKLHLYKGSWSDWSESLRAQTPEE

SEQ ID NO: 179 - protein, 757 aa, Artificial Sequence
  Polypeptide chain
DKTHTCPPCPAPELLGGPSVFLFPPKPKDTLMISRTPEVTCVVVDVSHEDPEVKFNWYVDGVEVHNAKTKPREEQYASTYRVVSVLTVLHQDWLNGKEYKCKVSNKALPAPIEKTISKAKGQPREPQVYTLPPCRDELTKNQVSLWCLVKGFYPSDIAVEWESNGQPENNYKTTPPVLDSDGSFFLYSKLTVDKSRWQQGNVFSCSVMHEALHNHYTQKSLSLSPGGGSGGSVPLSLYSGPIWELKKDVYVVELDWYPDAPGEMVVLTCDTPEEDGITWTLDQSSEVLGSGKTLTIQVKEFGDAGQYTCHKGGEVLSHSLLLLHKKEDGIWSTDILKDQKEPKNKTFLRCEAKNYSGRFTCWWLTTISTDLTFSVKSSRGSSDPQGVTCGAATLSAERVRGDNKEYEYSVECQEDSACPAAEESLPIEVMVDAVHKLKYENYTSSFFIRDIIKPDPPKNLQLKPLKNSRQVEVSWEYPDTWSTPHSYFSLTFSVQVQGKDNTEGRVFTDKTSATVICRKNASISVRAQDRYYSSSWSEWASVPCSGGGGSGGGGSGGGGSRNLPVATPDPGMFPCLHHSQNLLRAVSNMLQKARQTLEFYPCTSEEIDHEDITKDKTSTVEACLPLELTKNESCLNSRETSFITNGSCLASRKTSFMMALCLSSIYEDLKMYQVEFKTMNAKLLMDPKRQIFLDQNMLAVIDELMQALNFNSETVPQKSSLEEPDFYKTKIKLCILLHAFRIRAVTIDRVMSYLNAS

SEQ ID NO: 180 - protein, 528 aa, Artificial Sequence; identical to SEQ ID NO: 178
  Polypeptide chain

SEQ ID NO: 181 - protein, 759 aa, Artificial Sequence
  Polypeptide chain
DKTHTCPPCPAPELLGGPSVFLFPPKPKDTLMISRTPEVTCVVVDVSHEDPEVKFNWYVDGVEVHNAKTKPREEQYASTYRVVSVLTVLHQDWLNGKEYKCKVSNKALPAPIEKTISKAKGQPREPQVYTLPPCRDELTKNQVSLWCLVKGFYPSDIAVEWESNGQPENNYKTTPPVLDSDGSFFLYSKLTVDKSRWQQGNVFSCSVMHEALHNHYTQKSLSLSPGGGSGGSMPYDLYHPSGPIWELKKDVYVVELDWYPDAPGEMVVLTCDTPEEDGITWTLDQSSEVLGSGKTLTIQVKEFGDAGQYTCHKGGEVLSHSLLLLHKKEDGIWSTDILKDQKEPKNKTFLRCEAKNYSGRFTCWWLTTISTDLTFSVKSSRGSSDPQGVTCGAATLSAERVRGDNKEYEYSVECQEDSACPAAEESLPIEVMVDAVHKLKYENYTSSFFIRDIIKPDPPKNLQLKPLKNSRQVEVSWEYPDTWSTPHSYFSLTFSVQVQGKDNTEGRVFTDKTSATVICRKNASISVRAQDRYYSSSWSEWASVPCSGGGGSGGGGSGGGGSRNLPVATPDPGMFPCLHHSQNLLRAVSNMLQKARQTLEFYPCTSEEIDHEDITKDKTSTVEACLPLELTKNESCLNSRETSFITNGSCLASRKTSFMMALCLSSIYEDLKMYQVEFKTMNAKLLMDPKRQIFLDQNMLAVIDELMQALNFNSETVPQKSSLEEPDFYKTKIKLCILLHAFRIRAVTIDRVMSYLNAS

SEQ ID NO: 182 - protein, 527 aa, Artificial Sequence; identical to SEQ ID NO: 172
  Polypeptide chain

SEQ ID NO: 183 - protein, 762 aa, Artificial Sequence
  Polypeptide chain
DKTHTCPPCPAPELLGGPSVFLFPPKPKDTLMISRTPEVTCVVVDVSHEDPEVKFNWYVDGVEVHNAKTKPREEQYASTYRVVSVLTVLHQDWLNGKEYKCKVSNKALPAPIEKTISKAKGQPREPQVYTLPPCRDELTKNQVSLWCLVKGFYPSDIAVEWESNGQPENNYKTTPPVLDSDGSFFLYSKLTVDKSRWQQGNVFSCSVMHEALHNHYTQKSLSLSPGGGSGGSGGSMPYDLYHPSGPIWELKKDVYVVELDWYPDAPGEMVVLTCDTPEEDGITWTLDQSSEVLGSGKTLTIQVKEFGDAGQYTCHKGGEVLSHSLLLLHKKEDGIWSTDILKDQKEPKNKTFLRCEAKNYSGRFTCWWLTTISTDLTFSVKSSRGSSDPQGVTCGAATLSAERVRGDNKEYEYSVECQEDSACPAAEESLPIEVMVDAVHKLKYENYTSSFFIRDIIKPDPPKNLQLKPLKNSRQVEVSWEYPDTWSTPHSYFSLTFSVQVQGKDNTEGRVFTDKTSATVICRKNASISVRAQDRYYSSSWSEWASVPCSGGGGSGGGGSGGGGSRNLPVATPDPGMFPCLHHSQNLLRAVSNMLQKARQTLEFYPCTSEEIDHEDITKDKTSTVEACLPLELTKNESCLNSRETSFITNGSCLASRKTSFMMALCLSSIYEDLKMYQVEFKTMNAKLLMDPKRQIFLDQNMLAVIDELMQALNFNSETVPQKSSLEEPDFYKTKIKLCILLHAFRIRAVTIDRVMSYLNAS

SEQ ID NO: 184 - protein, 528 aa, Artificial Sequence; identical to SEQ ID NO: 178
  Polypeptide chain

SEQ ID NO: 185 - protein, 759 aa, Artificial Sequence
  Polypeptide chain
DKTHTCPPCPAPELLGGPSVFLFPPKPKDTLMISRTPEVTCVVVDVSHEDPEVKFNWYVDGVEVHNAKTKPREEQYASTYRVVSVLTVLHQDWLNGKEYKCKVSNKALPAPIEKTISKAKGQPREPQVYTLPPCRDELTKNQVSLWCLVKGFYPSDIAVEWESNGQPENNYKTTPPVLDSDGSFFLYSKLTVDKSRWQQGNVFSCSVMHEALHNHYTQKSLSLSPGGGSGGSDSGGFMLTSGPIWELKKDVYVVELDWYPDAPGEMVVLTCDTPEEDGITWTLDQSSEVLGSGKTLTIQVKEFGDAGQYTCHKGGEVLSHSLLLLHKKEDGIWSTDILKDQKEPKNKTFLRCEAKNYSGRFTCWWLTTISTDLTFSVKSSRGSSDPQGVTCGAATLSAERVRGDNKEYEYSVECQEDSACPAAEESLPIEVMVDAVHKLKYENYTSSFFIRDIIKPDPPKNLQLKPLKNSRQVEVSWEYPDTWSTPHSYFSLTFSVQVQGKDNTEGRVFTDKTSATVICRKNASISVRAQDRYYSSSWSEWASVPCSGGGGSGGGGSGGGGSRNLPVATPDPGMFPCLHHSQNLLRAVSNMLQKARQTLEFYPCTSEEIDHEDITKDKTSTVEACLPLELTKNESCLNSRETSFITNGSCLASRKTSFMMALCLSSIYEDLKMYQVEFKTMNAKLLMDPKRQIFLDQNMLAVIDELMQALNFNSETVPQKSSLEEPDFYKTKIKLCILLHAFRIRAVTIDRVMSYLNAS

SEQ ID NO: 186 - protein, 527 aa, Artificial Sequence; identical to SEQ ID NO: 172
  Polypeptide chain

SEQ ID NO: 187 - protein, 762 aa, Artificial Sequence
  Polypeptide chain
DKTHTCPPCPAPELLGGPSVFLFPPKPKDTLMISRTPEVTCVVVDVSHEDPEVKFNWYVDGVEVHNAKTKPREEQYASTYRVVSVLTVLHQDWLNGKEYKCKVSNKALPAPIEKTISKAKGQPREPQVYTLPPCRDELTKNQVSLWCLVKGFYPSDIAVEWESNGQPENNYKTTPPVLDSDGSFFLYSKLTVDKSRWQQGNVFSCSVMHEALHNHYTQKSLSLSPGGGSGGSGGSDSGGFMLTSGPIWELKKDVYVVELDWYPDAPGEMVVLTCDTPEEDGITWTLDQSSEVLGSGKTLTIQVKEFGDAGQYTCHKGGEVLSHSLLLLHKKEDGIWSTDILKDQKEPKNKTFLRCEAKNYSGRFTCWWLTTISTDLTFSVKSSRGSSDPQGVTCGAATLSAERVRGDNKEYEYSVECQEDSACPAAEESLPIEVMVDAVHKLKYENYTSSFFIRDIIKPDPPKNLQLKPLKNSRQVEVSWEYPDTWSTPHSYFSLTFSVQVQGKDNTEGRVFTDKTSATVICRKNASISVRAQDRYYSSSWSEWASVPCSGGGGSGGGGSGGGGSRNLPVATPDPGMFPCLHHSQNLLRAVSNMLQKARQTLEFYPCTSEEIDHEDITKDKTSTVEACLPLELTKNESCLNSRETSFITNGSCLASRKTSFMMALCLSSIYEDLKMYQVEFKTMNAKLLMDPKRQIFLDQNMLAVIDELMQALNFNSETVPQKSSLEEPDFYKTKIKLCILLHAFRIRAVTIDRVMSYLNAS

SEQ ID NO: 188 - protein, 528 aa, Artificial Sequence; identical to SEQ ID NO: 178
  Polypeptide chain

SEQ ID NO: 189 - protein, 759 aa, Artificial Sequence
  Polypeptide chain
DKTHTCPPCPAPELLGGPSVFLFPPKPKDTLMISRTPEVTCVVVDVSHEDPEVKFNWYVDGVEVHNAKTKPREEQYASTYRVVSVLTVLHQDWLNGKEYKCKVSNKALPAPIEKTISKAKGQPREPQVYTLPPCRDELTKNQVSLWCLVKGFYPSDIAVEWESNGQPENNYKTTPPVLDSDGSFFLYSKLTVDKSRWQQGNVFSCSVMHEALHNHYTQKSLSLSPGGGSGGSRAAAVKSPSGPIWELKKDVYVVELDWYPDAPGEMVVLTCDTPEEDGITWTLDQSSEVLGSGKTLTIQVKEFGDAGQYTCHKGGEVLSHSLLLLHKKEDGIWSTDILKDQKEPKNKTFLRCEAKNYSGRFTCWWLTTISTDLTFSVKSSRGSSDPQGVTCGAATLSAERVRGDNKEYEYSVECQEDSACPAAEESLPIEVMVDAVHKLKYENYTSSFFIRDIIKPDPPKNLQLKPLKNSRQVEVSWEYPDTWSTPHSYFSLTFSVQVQGKDNTEGRVFTDKTSATVICRKNASISVRAQDRYYSSSWSEWASVPCSGGGGSGGGGSGGGGSRNLPVATPDPGMFPCLHHSQNLLRAVSNMLQKARQTLEFYPCTSEEIDHEDITKDKTSTVEACLPLELTKNESCLNSRETSFITNGSCLASRKTSFMMALCLSSIYEDLKMYQVEFKTMNAKLLMDPKRQIFLDQNMLAVIDELMQALNFNSETVPQKSSLEEPDFYKTKIKLCILLHAFRIRAVTIDRVMSYLNAS

SEQ ID NO: 190 - protein, 527 aa, Artificial Sequence; identical to SEQ ID NO: 172
  Polypeptide chain

SEQ ID NO: 191 - protein, 762 aa, Artificial Sequence
  Polypeptide chain
DKTHTCPPCPAPELLGGPSVFLFPPKPKDTLMISRTPEVTCVVVDVSHEDPEVKFNWYVDGVEVHNAKTKPREEQYASTYRVVSVLTVLHQDWLNGKEYKCKVSNKALPAPIEKTISKAKGQPREPQVYTLPPCRDELTKNQVSLWCLVKGFYPSDIAVEWESNGQPENNYKTTPPVLDSDGSFFLYSKLTVDKSRWQQGNVFSCSVMHEALHNHYTQKSLSLSPGGGSGGSGGSRAAAVKSPSGPIWELKKDVYVVELDWYPDAPGEMVVLTCDTPEEDGITWTLDQSSEVLGSGKTLTIQVKEFGDAGQYTCHKGGEVLSHSLLLLHKKEDGIWSTDILKDQKEPKNKTFLRCEAKNYSGRFTCWWLTTISTDLTFSVKSSRGSSDPQGVTCGAATLSAERVRGDNKEYEYSVECQEDSACPAAEESLPIEVMVDAVHKLKYENYTSSFFIRDIIKPDPPKNLQLKPLKNSRQVEVSWEYPDTWSTPHSYFSLTFSVQVQGKDNTEGRVFTDKTSATVICRKNASISVRAQDRYYSSSWSEWASVPCSGGGGSGGGGSGGGGSRNLPVATPDPGMFPCLHHSQNLLRAVSNMLQKARQTLEFYPCTSEEIDHEDITKDKTSTVEACLPLELTKNESCLNSRETSFITNGSCLASRKTSFMMALCLSSIYEDLKMYQVEFKTMNAKLLMDPKRQIFLDQNMLAVIDELMQALNFNSETVPQKSSLEEPDFYKTKIKLCILLHAFRIRAVTIDRVMSYLNAS

SEQ ID NO: 192 - protein, 530 aa, Artificial Sequence
  Polypeptide chain
DKTHTCPPCPAPELLGGPSVFLFPPKPKDTLMISRTPEVTCVVVDVSHEDPEVKFNWYVDGVEVHNAKTKPREEQYASTYRVVSVLTVLHQDWLNGKEYKCKVSNKALPAPIEKTISKAKGQPREPQVCTLPPSRDELTKNQVSLSCAVKGFYPSDIAVEWESNGQPENNYKTTPPVLDSDGSFFLVSKLTVDKSRWQQGNVFSCSVMHEALHNHYTQKSLSLSPGGGSGGGSGKIDACKRGDVTVKPSHVILLGSTVNITCSLKPRQGCFHYSRRNKLILYKFDRRINFHHGHSLNSQVTGLPLGTTLFVCKLACINSDEIQICGAEIFVGVAPEQPQNLSCIQKGEQGTVACTWERGRDTHLYTEYTLQLSGPKNLTWQKQCKDIYCDYLDFGINLTPESPESNFTAKVTAVNSLGSSSSLPSTFTFLDIVRPLPPWDIRIKFQKASVSRSTLYWRDEGLVLLNRLRYRPSNSRLWNMVNVTKAKGRHDLLDLKPFTEYEFQISSKLHLYKGSWSDWSESLRAQTPEE

SEQ ID NO: 193 - protein, 761 aa, Artificial Sequence
  Polypeptide chain
DKTHTCPPCPAPELLGGPSVFLFPPKPKDTLMISRTPEVTCVVVDVSHEDPEVKFNWYVDGVEVHNAKTKPREEQYASTYRVVSVLTVLHQDWLNGKEYKCKVSNKALPAPIEKTISKAKGQPREPQVYTLPPCRDELTKNQVSLWCLVKGFYPSDIAVEWESNGQPENNYKTTPPVLDSDGSFFLYSKLTVDKSRWQQGNVFSCSVMHEALHNHYTQKSLSLSPGGGSGGSISSGLLSGRSSGPIWELKKDVYVVELDWYPDAPGEMVVLTCDTPEEDGITWTLDQSSEVLGSGKTLTIQVKEFGDAGQYTCHKGGEVLSHSLLLLHKKEDGIWSTDILKDQKEPKNKTFLRCEAKNYSGRFTCWWLTTISTDLTFSVKSSRGSSDPQGVTCGAATLSAERVRGDNKEYEYSVECQEDSACPAAEESLPIEVMVDAVHKLKYENYTSSFFIRDIIKPDPPKNLQLKPLKNSRQVEVSWEYPDTWSTPHSYFSLTFSVQVQGKDNTEGRVFTDKTSATVICRKNASISVRAQDRYYSSSWSEWASVPCSGGGGSGGGGSGGGGSRNLPVATPDPGMFPCLHHSQNLLRAVSNMLQKARQTLEFYPCTSEEIDHEDITKDKTSTVEACLPLELTKNESCLNSRETSFITNGSCLASRKTSFMMALCLSSIYEDLKMYQVEFKTMNAKLLMDPKRQIFLDQNMLAVIDELMQALNFNSETVPQKSSLEEPDFYKTKIKLCILLHAFRIRAVTIDRVMSYLNAS

SEQ ID NO: 194 - protein, 530 aa, Artificial Sequence; identical to SEQ ID NO: 192
  Polypeptide chain

SEQ ID NO: 195 - protein, 764 aa, Artificial Sequence
  Polypeptide chain
DKTHTCPPCPAPELLGGPSVFLFPPKPKDTLMISRTPEVTCVVVDVSHEDPEVKFNWYVDGVEVHNAKTKPREEQYASTYRVVSVLTVLHQDWLNGKEYKCKVSNKALPAPIEKTISKAKGQPREPQVYTLPPCRDELTKNQVSLWCLVKGFYPSDIAVEWESNGQPENNYKTTPPVLDSDGSFFLYSKLTVDKSRWQQGNVFSCSVMHEALHNHYTQKSLSLSPGGGSGGSGGSISSGLLSGRSSGPIWELKKDVYVVELDWYPDAPGEMVVLTCDTPEEDGITWTLDQSSEVLGSGKTLTIQVKEFGDAGQYTCHKGGEVLSHSLLLLHKKEDGIWSTDILKDQKEPKNKTFLRCEAKNYSGRFTCWWLTTISTDLTFSVKSSRGSSDPQGVTCGAATLSAERVRGDNKEYEYSVECQEDSACPAAEESLPIEVMVDAVHKLKYENYTSSFFIRDIIKPDPPKNLQLKPLKNSRQVEVSWEYPDTWSTPHSYFSLTFSVQVQGKDNTEGRVFTDKTSATVICRKNASISVRAQDRYYSSSWSEWASVPCSGGGGSGGGGSGGGGSRNLPVATPDPGMFPCLHHSQNLLRAVSNMLQKARQTLEFYPCTSEEIDHEDITKDKTSTVEACLPLELTKNESCLNSRETSFITNGSCLASRKTSFMMALCLSSIYEDLKMYQVEFKTMNAKLLMDPKRQIFLDQNMLAVIDELMQALNFNSETVPQKSSLEEPDFYKTKIKLCILLHAFRIRAVTIDRVMSYLNAS

SEQ ID NO: 196 - protein, 530 aa, Artificial Sequence; identical to SEQ ID NO: 192
  Polypeptide chain

SEQ ID NO: 197 - protein, 759 aa, Artificial Sequence; identical to SEQ ID NO: 189
  Polypeptide chain

SEQ ID NO: 198 - protein, 530 aa, Artificial Sequence; identical to SEQ ID NO: 192
  Polypeptide chain

SEQ ID NO: 199 - protein, 762 aa, Artificial Sequence; identical to SEQ ID NO: 191
  Polypeptide chain

SEQ ID NO: 200 - protein, 528 aa, Artificial Sequence; identical to SEQ ID NO: 178
  Polypeptide chain

SEQ ID NO: 201 - protein, 761 aa, Artificial Sequence; identical to SEQ ID NO: 193
  Polypeptide chain

SEQ ID NO: 202 - protein, 527 aa, Artificial Sequence; identical to SEQ ID NO: 172
  Polypeptide chain

SEQ ID NO: 203 - protein, 764 aa, Artificial Sequence; identical to SEQ ID NO: 195
  Polypeptide chain

SEQ ID NO: 204 - protein, 306 aa, Artificial Sequence; identical to SEQ ID NO: 124
  Cytokine

SEQ ID NO: 205 - protein, 303 aa, Artificial Sequence
  Cytokine
IWELKKDVYVVELDWYPDAPGEMVVLTCDTPEEDGITWTLDQSSEVLGSGKTLTIQVKEFGDAGQYTCHKGGEVLSHSLLLLHKKEDGIWSTDILKDQKEPKNKTFLRCEAKNYSGRFTCWWLTTISTDLTFSVKSSRGSSDPQGVTCGAATLSAERVRGDNKEYEYSVECQEDSACPAAEESLPIEVMVDAVHKLKYENYTSSFFIRDIIKPDPPKNLQLKPLKNSRQVEVSWEYPDTWSTPHSYFSLTFCVQVQGKDNTERVFTDKTSATVICRKNASISVRAQDRYYSSSWSEWASVPCS

SEQ ID NO: 206 - protein, 304 aa, Artificial Sequence
  Cytokine
IWELKKDVYVVELDWYPDAPGEMVVLTCDTPEEDGITWTLDQSSEVLGSGKTLTIQVKEFGDAGQYTCHKGGEVLSHSLLLLHKKEDGIWSTDILKDQKEPKNKTFLRCEAKNYSGRFTCWWLTTISTDLTFSVKSSRGSSDPQGVTCGAATLSAERVRGDNKEYEYSVECQEDSACPAAEESLPIEVMVDAVHKLKYENYTSSFFIRDIIKPDPPKNLQLKPLKNSRQVEVSWEYPDTWSTPHSYFSLTFCVQVQGKDNTEGRVFTDKTSATVICRKNASISVRAQDRYYSSSWSEWASVPCS

SEQ ID NO: 207 - protein, 306 aa, Artificial Sequence
  Cytokine
IWELKKDVYVVELDWYPDAPGEMVVLTCDTPEEDGITWTLDQSSEVLGSGKTLTIQVKEFGDAGQYTCHKGGEVLSHSLLLLHKKEDGIWSTDILKDQKEPKNKTFLRCEAKNYSGRFTCWWLTTISTDLTFSVKSSRGSSDPQGVTCGAATLSAERVRGDNKEYEYSVECQEDSACPAAEESLPIEVMVDAVHKLKYENYTSSFFIRDIIKPDPPKNLQLKPLKNSRQVEVSWEYPDTWSTPHSYFSLTFSVQVQGKSKREKKDRVFTDKTSATVICRKNASISVRAQDRYYSSSWSEWASVPCS

SEQ ID NO: 208 - protein, 304 aa, Artificial Sequence
  Cytokine
IWELKKDVYVVELDWYPDAPGEMVVLTCDTPEEDGITWTLDQSSEVLGSGKTLTIQVKEFGDAGQYTCHKGGEVLSHSLLLLHKKEDGIWSTDILKDQKEPKNKTFLRCEAKNYSGRFTCWWLTTISTDLTFSVKSSRGSSDPQGVTCGAATLSAERVRGDNKEYEYSVECQEDSACPAAEESLPIEVMVDAVHKLKYENYTSSFFIRDIIKPDPPKNLQLKPLKNSRQVEVSWEYPDTWSTPHSYFSLTFSVQVQGKDNTEGRVFTDKTSATVICRKNASISVRAQDRYYSSSWSEWASVPCS

SEQ ID NO: 209 - protein, 197 aa, Artificial Sequence; identical to SEQ ID NO: 125
  Cytokine

SEQ ID NO: 210 - protein, 518 aa, Artificial Sequence
  Cytokine
IWELKKDVYVVELDWYPDAPGEMVVLTCDTPEEDGITWTLDQSSEVLGSGKTLTIQVKEFGDAGQYTCHKGGEVLSHSLLLLHKKEDGIWSTDILKDQKEPKNKTFLRCEAKNYSGRFTCWWLTTISTDLTFSVKSSRGSSDPQGVTCGAATLSAERVRGDNKEYEYSVECQEDSACPAAEESLPIEVMVDAVHKLKYENYTSSFFIRDIIKPDPPKNLQLKPLKNSRQVEVSWEYPDTWSTPHSYFSLTFCVQVQGKSKREKKDRVFTDKTSATVICRKNASISVRAQDRYYSSSWSEWASVPCSGGGGSGGGGSGGGGSRNLPVATPDPGMFPCLHHSQNLLRAVSNMLQKARQTLEFYPCTSEEIDHEDITKDKTSTVEACLPLELTKNESCLNSRETSFITNGSCLASRKTSFMMALCLSSIYEDLKMYQVEFKTMNAKLLMDPKRQIFLDQNMLAVIDELMQALNFNSETVPQKSSLEEPDFYKTKIKLCILLHAFRIRAVTIDRVMSYLNAS

SEQ ID NO: 211 - protein, 515 aa, Artificial Sequence
  Cytokine
IWELKKDVYVVELDWYPDAPGEMVVLTCDTPEEDGITWTLDQSSEVLGSGKTLTIQVKEFGDAGQYTCHKGGEVLSHSLLLLHKKEDGIWSTDILKDQKEPKNKTFLRCEAKNYSGRFTCWWLTTISTDLTFSVKSSRGSSDPQGVTCGAATLSAERVRGDNKEYEYSVECQEDSACPAAEESLPIEVMVDAVHKLKYENYTSSFFIRDIIKPDPPKNLQLKPLKNSRQVEVSWEYPDTWSTPHSYFSLTFCVQVQGKDNTERVFTDKTSATVICRKNASISVRAQDRYYSSSWSEWASVPCSGGGGSGGGGSGGGGSRNLPVATPDPGMFPCLHHSQNLLRAVSNMLQKARQTLEFYPCTSEEIDHEDITKDKTSTVEACLPLELTKNESCLNSRETSFITNGSCLASRKTSFMMALCLSSIYEDLKMYQVEFKTMNAKLLMDPKRQIFLDQNMLAVIDELMQALNFNSETVPQKSSLEEPDFYKTKIKLCILLHAFRIRAVTIDRVMSYLNAS

SEQ ID NO: 212 - protein, 516 aa, Artificial Sequence
  Cytokine
IWELKKDVYVVELDWYPDAPGEMVVLTCDTPEEDGITWTLDQSSEVLGSGKTLTIQVKEFGDAGQYTCHKGGEVLSHSLLLLHKKEDGIWSTDILKDQKEPKNKTFLRCEAKNYSGRFTCWWLTTISTDLTFSVKSSRGSSDPQGVTCGAATLSAERVRGDNKEYEYSVECQEDSACPAAEESLPIEVMVDAVHKLKYENYTSSFFIRDIIKPDPPKNLQLKPLKNSRQVEVSWEYPDTWSTPHSYFSLTFCVQVQGKDNTEGRVFTDKTSATVICRKNASISVRAQDRYYSSSWSEWASVPCSGGGGSGGGGSGGGGSRNLPVATPDPGMFPCLHHSQNLLRAVSNMLQKARQTLEFYPCTSEEIDHEDITKDKTSTVEACLPLELTKNESCLNSRETSFITNGSCLASRKTSFMMALCLSSIYEDLKMYQVEFKTMNAKLLMDPKRQIFLDQNMLAVIDELMQALNFNSETVPQKSSLEEPDFYKTKIKLCILLHAFRIRAVTIDRVMSYLNAS

SEQ ID NO: 213 - protein, 518 aa, Artificial Sequence
  Cytokine
IWELKKDVYVVELDWYPDAPGEMVVLTCDTPEEDGITWTLDQSSEVLGSGKTLTIQVKEFGDAGQYTCHKGGEVLSHSLLLLHKKEDGIWSTDILKDQKEPKNKTFLRCEAKNYSGRFTCWWLTTISTDLTFSVKSSRGSSDPQGVTCGAATLSAERVRGDNKEYEYSVECQEDSACPAAEESLPIEVMVDAVHKLKYENYTSSFFIRDIIKPDPPKNLQLKPLKNSRQVEVSWEYPDTWSTPHSYFSLTFSVQVQGKSKREKKDRVFTDKTSATVICRKNASISVRAQDRYYSSSWSEWASVPCSGGGGSGGGGSGGGGSRNLPVATPDPGMFPCLHHSQNLLRAVSNMLQKARQTLEFYPCTSEEIDHEDITKDKTSTVEACLPLELTKNESCLNSRETSFITNGSCLASRKTSFMMALCLSSIYEDLKMYQVEFKTMNAKLLMDPKRQIFLDQNMLAVIDELMQALNFNSETVPQKSSLEEPDFYKTKIKLCILLHAFRIRAVTIDRVMSYLNAS

SEQ ID NO: 214 - protein, 516 aa, Artificial Sequence
  Cytokine
IWELKKDVYVVELDWYPDAPGEMVVLTCDTPEEDGITWTLDQSSEVLGSGKTLTIQVKEFGDAGQYTCHKGGEVLSHSLLLLHKKEDGIWSTDILKDQKEPKNKTFLRCEAKNYSGRFTCWWLTTISTDLTFSVKSSRGSSDPQGVTCGAATLSAERVRGDNKEYEYSVECQEDSACPAAEESLPIEVMVDAVHKLKYENYTSSFFIRDIIKPDPPKNLQLKPLKNSRQVEVSWEYPDTWSTPHSYFSLTFSVQVQGKDNTEGRVFTDKTSATVICRKNASISVRAQDRYYSSSWSEWASVPCSGGGGSGGGGSGGGGSRNLPVATPDPGMFPCLHHSQNLLRAVSNMLQKARQTLEFYPCTSEEIDHEDITKDKTSTVEACLPLELTKNESCLNSRETSFITNGSCLASRKTSFMMALCLSSIYEDLKMYQVEFKTMNAKLLMDPKRQIFLDQNMLAVIDELMQALNFNSETVPQKSSLEEPDFYKTKIKLCILLHAFRIRAVTIDRVMSYLNAS

SEQ ID NO: 215 - protein, 213 aa, Artificial Sequence
  Masking moiety
CRTSECCFQDPPYPDADSGSASGPRDLRCYRISSDRYECSWQYEGPTAGVSHFLRCCLSSGRCCYFAAGSATRLQFSDQAGVSVLYTVTLWVESWARNQTEKSPEVTLQLYNSVKYEPPLGDIKVSKLAGQLRMEWETPDNQVGAEVQFRHRTPSSPWKLGDCGPQDDDTESCLCPLEMNVAQEFQLRRRQLGSQGSSWSKWSSPVCVPPENP

SEQ ID NO: 216 - protein, 522 aa, Artificial Sequence
  Masking moiety
CRTSECCFQDPPYPDADSGSASGPRDLRCYRISSDRYECSWQYEGPTAGVSHFLRCCLSSGRCCYFAAGSATRLQFSDQAGVSVLYTVTLWVESWARNQTEKSPEVTLQLYNSVKYEPPLGDIKVSKLAGQLRMEWETPDNQVGAEVQFRHRTPSSPWKLGDCGPQDDDTESCLCPLEMNVAQEFQLRRRQLGSQGSSWSKWSSPVCVPPENPPQPQVRFSVEQLGQDGRRRLTLKEQPTQLELPEGCQGLAPGTEVTYRLQLHMLSCPCKAKATRTLHLGKMPYLSGAAYNVAVISSNQFGPGLNQTWHIPADTHTEPVALNISVGTNGTTMYWPARAQSMTYCIEWQPVGQDGGLATCSLTAPQDPDPAGMATYSWSRESGAMGQEKCYYITIFASAHPEKLTLWSTVLSTYHFGGNASAAGTPHHVSVKNHSLDSVSVDWAPSLLSTCPGVLKEYVVRCRDEDSKQVSEHPVQPTETQVTLSGLRAGVAYTVQVRADTAWLRGVWSQPQRFSIEVQVSD

SEQ ID NO: 217 - protein, 189 aa, Artificial Sequence
  Masking moiety
KIDACKRGDVTVKPSHVILLGSTVNITCSLKPRQGCFHYSRRNKLILYKFDRRINFHHGHSLNSQVTGLPLGTTLFVCKLACINSDEIQICGAEIFVGVAPEQPQNLSCIQKGEQGTVACTWERGRDTHLYTEYTLQLSGPKNLTWQKQCKDIYCDYLDFGINLTPESPESNFTAKVTAVNSLGSSSSL

SEQ ID NO: 218 - protein, 199 aa, Artificial Sequence
  Masking moiety
KIDACKRGDVTVKPSHVILLGSTVNITCSLKPRQGCFHYSRRNKLILYKFDRRINFHHGHSLNSQVTGLPLGTTLFVCKLACINSDEIQICGAEIFVGVAPEQPQNLSCIQKGEQGTVACTWERGRDTHLYTEYTLQLSGPKNLTWQKQCKDIYCDYLDFGINLTPESPESNFTAKVTAVNSLGSSSSLPSTFTFLDIV

SEQ ID NO: 219 - protein, 296 aa, Artificial Sequence
  Masking moiety
KIDACKRGDVTVKPSHVILLGSTVNITCSLKPRQGCFHYSRRNKLILYKFDRRINFHHGHSLNSQVTGLPLGTTLFVCKLACINSDEIQICGAEIFVGVAPEQPQNLSCIQKGEQGTVACTWERGRDTHLYTEYTLQLSGPKNLTWQKQCKDIYCDYLDFGINLTPESPESNFTAKVTAVNSLGSSSSLPSTFTFLDIVRPLPPWDIRIKFQKASVSRCTLYWRDEGLVLLNRLRYRPSNSRLWNMVNVTKAKGRHDLLDLKPFTEYEFQISSKLHLYKGSWSDWSESLRAQTPEE

SEQ ID NO: 220 - protein, 296 aa, Artificial Sequence
  Masking moiety
KIDACKRGDVTVKPSHVILLGSTVNITCSLKPRQGCFHYSRRNKLILYKFDRRINFHHGHSLNSQVTGLPLGTTLFVCKLACINSDEIQICGAEIFVGVAPEQPQNLSCIQKGEQGTVACTWERGRDTHLYTEYTLQLSGPKNLTWQKQCKDIYCDYLDFGINLTPESPESNFTAKVTAVNSLGSSSSLPSTFTFLDIVRPLPPWDIRIKFQKASVSRSTLYWRDEGLVLLNRLRYRPSNSRLWNMVNVTKAKGRHDLLDLKPFTEYEFQISSKLHLYKGSWSDWSESLRAQTPEE

SEQ ID NO: 221 - protein, 599 aa, Artificial Sequence
  Masking moiety
KIDACKRGDVTVKPSHVILLGSTVNITCSLKPRQGCFHYSRRNKLILYKFDRRINFHHGHSLNSQVTGLPLGTTLFVCKLACINSDEIQICGAEIFVGVAPEQPQNLSCIQKGEQGTVACTWERGRDTHLYTEYTLQLSGPKNLTWQKQCKDIYCDYLDFGINLTPESPESNFTAKVTAVNSLGSSSSLPSTFTFLDIVRPLPPWDIRIKFQKASVSRCTLYWRDEGLVLLNRLRYRPSNSRLWNMVNVTKAKGRHDLLDLKPFTEYEFQISSKLHLYKGSWSDWSESLRAQTPEEEPTGMLDVWYMKRHIDYSRQQISLFWKNLSVSEARGKILHYQVTLQELTGGKAMTQNITGHTSWTTVIPRTGNWAVAVSAANSKGSSLPTRINIMNLCEAGLLAPRQVSANSEGMDNILVTWQPPRKDPSAVQEYVVEWRELHPGGDTQVPLNWLRSRPYNVSALISENIKSYICYEIRVYALSGDQGGCSSILGNSKHKAPLSGPHINAITEEKGSILISWNSIPVQEQMGCLLHYRIYWKERDSNSQPQLCEIPYRVSQNSHPINSLQPRVTYVLWMTALTAAGESSHGNEREFCLQGKAN

SEQ ID NO: 222 - protein, 204 aa, Artificial Sequence
  Masking moiety
KIDACKRGDVTVKPSHVILLGSTVNITCSLKPRQGCFHYSRRNKLILYKFDRRINFHHGHSLNSQVTGLPLGTTLFVCKLACINSDEIQICGAEIFVGVAPEQPQNLSCIQKGEQGTVACTWERGRDTHLYTEYTLQLSGPKNLTWQKQCKDIYCDYLDFGINLTPESPESNFTAKVTAVNSLGSSSSLPSTFTFLDIVRPLPP

SEQ ID NO: 223 - protein, 162 aa, Artificial Sequence; identical to SEQ ID NO: 130
  Cytokine

SEQ ID NO: 224 - protein, 114 aa, Artificial Sequence; identical to SEQ ID NO: 131
  Cytokine

SEQ ID NO: 225 - protein, 114 aa, Artificial Sequence
  Cytokine
NWVNVISDLKKIEDLIQSMHIAATLYTESDVHPSCKVTAMKCFLLELQVISLESGDASIHDTVENLIILANNSLSSNGNVTESGCKECEELEEKNIKEFLQSFVHIVQMFINTS

SEQ ID NO: 226 - protein, 114 aa, Artificial Sequence
  Cytokine
NWVNVISDLKKIEDLIQSMHIDATLYTESDVHPSCKVTAMKCFLLALQVISLESGDASIHDTVENLIILANNSLSSNGNVTESGCKECEELEEKNIKEFLQSFVHIVQMFINTS

SEQ ID NO: 227 - protein, 114 aa, Artificial Sequence
  Cytokine
NWVNVISDLKKIEDLIQSMHIDATLYTESDVHPSCKVTAMKCFLLALQVISLASGDASIHDTVENLIILANNSLSSNGNVTESGCKECEELEEKNIKEFLQSFVHIVQMFINTS

SEQ ID NO: 228 - protein, 114 aa, Artificial Sequence
  Cytokine
NWVNVISDLKKIEDLIQSMHIDATLYTESDVHPSCKVTAMKCFLLRLQVISLRSGDASIHDTVENLIILANNSLSSNGNVTESGCKECEELEEKNIKEFLQSFVHIVQMFINTS

SEQ ID NO: 229 - protein, 114 aa, Artificial Sequence
  Cytokine
NWVNVISDLKKIEDLIQSMHIDATLYTESDVHPSCKVTAMKCFLLSLQVISLSSGDASIHDTVENLIILANNSLSSNGNVTESGCKECEELEEKNIKEFLQSFVHIVQMFINTS

SEQ ID NO: 230 - protein, 114 aa, Artificial Sequence
  Cytokine
NWVNVISDLKKIEDLIQSMHIDATLYTESDVHPSCKVTAMKCFLLELQVISLASGDASIHDTVENLIILANNSLSSNGNVTESGCKECEELEEKNIKEFLQSFVHIVQMFINTS

SEQ ID NO: 231 - protein, 18 aa, Artificial Sequence
  Cytokine
NWVNVISDLKKIEDLIQS

SEQ ID NO: 232 - protein, 79 aa, Artificial Sequence
  Cytokine
KVTAMKCFLLELQVISLESGDASIHDTVENLIILANNSLSSNGNVTESGCKECEELEEKNIKEFLQSFVHIVQMFINTS

SEQ ID NO: 233 - protein, 114 aa, Artificial Sequence
  Cytokine
NWVNVISDLKKIEDLIQSMHIDATLYTESDVHPSCKVTAMKCFLLELQVISLESGDASIHDTVENLIILAQNSLSSNGNVTESGCKECEELEEKNIKEFLQSFVHIVQMFINTS

SEQ ID NO: 234 - protein, 114 aa, Artificial Sequence
  Cytokine
NWVNVISDLKKIEDLIQSMHIDATLYTESDVHPSCKVTAMKCFLLELQVISLESGDASIHDTVENLIILANNSLSSNGQVTESGCKECEELEEKNIKEFLQSFVHIVQMFINTS

SEQ ID NO: 235 - protein, 114 aa, Artificial Sequence
  Cytokine
NWVNVISDLKKIEDLIQSMHIDATLYTESDVHPSCKVTAMKCFLLELQVISLESGDASIHDTVENLIILANNSLSSNGNVTESGCKECEELEEKNIKEFLQSFVHIVQMFIQTS

SEQ ID NO: 236 - protein, 114 aa, Artificial Sequence
  Cytokine
NWVNVISDLKKIEDLIQSMHIDATLYTESDVHPSCKVTAMKCFLLELQVISLESGDASIHDTVENLIILAQNSLSSNGQVTESGCKECEELEEKNIKEFLQSFVHIVQMFINTS

SEQ ID NO: 237 - protein, 114 aa, Artificial Sequence
  Cytokine
NWVNVISDLKKIEDLIQSMHIDATLYTESDVHPSCKVTAMKCFLLELQVISLESGDASIHDTVENLIILAQNSLSSNGNVTESGCKECEELEEKNIKEFLQSFVHIVQMFIQTS

SEQ ID NO: 238 - protein, 114 aa, Artificial Sequence
  Cytokine
NWVNVISDLKKIEDLIQSMHIDATLYTESDVHPSCKVTAMKCFLLELQVISLESGDASIHDTVENLIILANNSLSSNGQVTESGCKECEELEEKNIKEFLQSFVHIVQMFIQTS

SEQ ID NO: 239 - protein, 114 aa, Artificial Sequence
  Cytokine
NWVNVISDLKKIEDLIQSMHIDATLYTESDVHPSCKVTAMKCFLLELQVISLESGDASIHDTVENLIILAQNSLSSNGQVTESGCKECEELEEKNIKEFLQSFVHIVQMFIQTS

SEQ ID NO: 240 - protein, 213 aa, Artificial Sequence; identical to SEQ ID NO: 4
  Masking moiety

SEQ ID NO: 241 - protein, 213 aa, Artificial Sequence; identical to SEQ ID NO: 5
  Masking moiety

SEQ ID NO: 242 - protein, 15 aa, Artificial Sequence
  Linker
GSPDLLAVVAASSGP

SEQ ID NO: 243 - protein, 16 aa, Artificial Sequence
  Linker
GSPGDLLAVVAASSGP

SEQ ID NO: 244 - protein, 18 aa, Artificial Sequence
  Linker
GSGSPSDLLAVVAASSGP

SEQ ID NO: 245 - protein, 16 aa, Artificial Sequence
  Linker
GGPSDLLAVVAASSGP

SEQ ID NO: 246 - protein, 17 aa, Artificial Sequence
  Linker
GSGPSDLLAVVAASSGP

SEQ ID NO: 247 - protein, 18 aa, Artificial Sequence
  Linker
GSSGGPDLLAVVAASSGP

SEQ ID NO: 248 - protein, 9 aa, Artificial Sequence
  Cleavable peptide
DLLAVVAAS

SEQ ID NO: 249 - protein, 10 aa, Artificial Sequence
  Cleavable peptide
ISSGLLSGRS

SEQ ID NO: 250 - protein, 4 aa, Artificial Sequence
  Linker
GGPS

SEQ ID NO: 251 - protein, 5 aa, Artificial Sequence
  Linker
GSGPS

SEQ ID NO: 252 - protein, 6 aa, Artificial Sequence
  Linker
GSSGGP

SEQ ID NO: 253 - skipped

SEQ ID NO: 254 - protein, 6 aa, Artificial Sequence
  Linker
GSGSPS

SEQ ID NO: 255 - protein, 454 aa, Artificial Sequence
  Polypeptide chain
DKTHTCPPCPAPELLGGPSVFLFPPKPKDTLMISRTPEVTCVVVDVSHEDPEVKFNWYVDGVEVHNAKTKPREEQYASTYRVVSVLTVLHQDWLNGKEYKCKVSNKALPAPIEKTISKAKGQPREPQVCTLPPSRDELTKNQVSLSCAVKGFYPSDIAVEWESNGQPENNYKTTPPVLDSDGSFFLVSKLTVDKSRWQQGNVFSCSVMHEALHNHYTQKSLSLSPGGSPDLLAVVAASSGPAVNGTSQFTCFYNSRANISCVWSQDGALQDTSCQVHAWPDRRRWNQTCELLPVSQASWACNLILGAPDSQKLTTVDIVTLRVLCREGVRWRVMAIQDFKPFENLRLMAPISLQVVHVETHRCNISWEISQASHYFERHLEFEARTLSPGHTWEEAPLLTLKQKQEWICLETLTPDTQYEFQVRVKPLQGEFTTWSPWSQPLAFRTKPAALGKD

SEQ ID NO: 256 - protein, 455 aa, Artificial Sequence
  Polypeptide chain
DKTHTCPPCPAPELLGGPSVFLFPPKPKDTLMISRTPEVTCVVVDVSHEDPEVKFNWYVDGVEVHNAKTKPREEQYASTYRVVSVLTVLHQDWLNGKEYKCKVSNKALPAPIEKTISKAKGQPREPQVCTLPPSRDELTKNQVSLSCAVKGFYPSDIAVEWESNGQPENNYKTTPPVLDSDGSFFLVSKLTVDKSRWQQGNVFSCSVMHEALHNHYTQKSLSLSPGGSPGDLLAVVAASSGPAVNGTSQFTCFYNSRANISCVWSQDGALQDTSCQVHAWPDRRRWNQTCELLPVSQASWACNLILGAPDSQKLTTVDIVTLRVLCREGVRWRVMAIQDFKPFENLRLMAPISLQVVHVETHRCNISWEISQASHYFERHLEFEARTLSPGHTWEEAPLLTLKQKQEWICLETLTPDTQYEFQVRVKPLQGEFTTWSPWSQPLAFRTKPAALGKD

SEQ ID NO: 257 - protein, 456 aa, Artificial Sequence
  Polypeptide chain
DKTHTCPPCPAPELLGGPSVFLFPPKPKDTLMISRTPEVTCVVVDVSHEDPEVKFNWYVDGVEVHNAKTKPREEQYASTYRVVSVLTVLHQDWLNGKEYKCKVSNKALPAPIEKTISKAKGQPREPQVCTLPPSRDELTKNQVSLSCAVKGFYPSDIAVEWESNGQPENNYKTTPPVLDSDGSFFLVSKLTVDKSRWQQGNVFSCSVMHEALHNHYTQKSLSLSPGSGSPSDLLAVVAASSGPAVNGTSQFTCFYNSRANISCVWSQDGALQDTSCQVHAWPDRRRWNQTCELLPVSQASWACNLILGAPDSQKLTTVDIVTLRVLCREGVRWRVMAIQDFKPFENLRLMAPISLQVVHVETHRCNISWEISQASHYFERHLEFEARTLSPGHTWEEAPLLTLKQKQEWICLETLTPDTQYEFQVRVKPLQGEFTTWSPWSQPLAFRTKPAALGKD

SEQ ID NO: 258 - protein, 375 aa, Artificial Sequence
  Polypeptide chain
DKTHTCPPCPAPELLGGPSVFLFPPKPKDTLMISRTPEVTCVVVDVSHEDPEVKFNWYVDGVEVHNAKTKPREEQYASTYRVVSVLTVLHQDWLNGKEYKCKVSNKALPAPIEKTISKAKGQPREPQVYTLPPCRDELTKNQVSLWCLVKGFYPSDIAVEWESNGQPENNYKTTPPVLDSDGSFFLYSKLTVDKSRWQQGNVFSCSVMHEALHNHYTQKSLSLSPGGGPSDLLAVVAASSGPAPTSSSTKKTQLQLEHLLLDLQMILNGINNYKNPKLTAMLTAKFAMPKKATELKHLQCLEEALKPLEEVLNLAQSKNFHLRPRDLISNINVIVLELKGSETTFMCEYADETATIVEFLNRWITFAQSIISTLT

SEQ ID NO: 259 - protein, 376 aa, Artificial Sequence
  Polypeptide chain
DKTHTCPPCPAPELLGGPSVFLFPPKPKDTLMISRTPEVTCVVVDVSHEDPEVKFNWYVDGVEVHNAKTKPREEQYASTYRVVSVLTVLHQDWLNGKEYKCKVSNKALPAPIEKTISKAKGQPREPQVYTLPPCRDELTKNQVSLWCLVKGFYPSDIAVEWESNGQPENNYKTTPPVLDSDGSFFLYSKLTVDKSRWQQGNVFSCSVMHEALHNHYTQKSLSLSPGGSGPSDLLAVVAASSGPAPTSSSTKKTQLQLEHLLLDLQMILNGINNYKNPKLTAMLTAKFAMPKKATELKHLQCLEEALKPLEEVLNLAQSKNFHLRPRDLISNINVIVLELKGSETTFMCEYADETATIVEFLNRWITFAQSIISTLT

SEQ ID NO: 260 - protein, 377 aa, Artificial Sequence
  Polypeptide chain
DKTHTCPPCPAPELLGGPSVFLFPPKPKDTLMISRTPEVTCVVVDVSHEDPEVKFNWYVDGVEVHNAKTKPREEQYASTYRVVSVLTVLHQDWLNGKEYKCKVSNKALPAPIEKTISKAKGQPREPQVYTLPPCRDELTKNQVSLWCLVKGFYPSDIAVEWESNGQPENNYKTTPPVLDSDGSFFLYSKLTVDKSRWQQGNVFSCSVMHEALHNHYTQKSLSLSPGGSSGGPDLLAVVAASSGPAPTSSSTKKTQLQLEHLLLDLQMILNGINNYKNPKLTAMLTAKFAMPKKATELKHLQCLEEALKPLEEVLNLAQSKNFHLRPRDLISNINVIVLELKGSETTFMCEYADETATIVEFLNRWITFAQSIISTLT

SEQ ID NO: 261 - protein, 141 aa, Artificial Sequence
  Cleavage product
VVAASSGPAPTSSSTKKTQLQLEHLLLDLQMILNGINNYKNPKLTAMLTAKFAMPKKATELKHLQCLEEALKPLEEVLNLAQSKNFHLRPRDLISNINVIVLELKGSETTFMCEYADETATIVEFLNRWITFAQSIISTLT

SEQ ID NO: 262 - protein, 609 aa, Artificial Sequence
  Cleavage product
DKTHTCPPCPAPELLGGPSVFLFPPKPKDTLMISRTPEVTCVVVDVSHEDPEVKFNWYVDGVEVHNAKTKPREEQYASTYRVVSVLTVLHQDWLNGKEYKCKVSNKALPAPIEKTISKAKGQPREPQVYTLPPCRDELTKNQVSLWCLVKGFYPSDIAVEWESNGQPENNYKTTPPVLDSDGSFFLYSKLTVDKSRWQQGNVFSCSVMHEALHNHYTQKSLSLSPGGGSSPPGGGSSGGGSGPAPTSSSTKKTQLQLEHLLLDLQMILNGINNYKNPKLTAMLTAKFAMPKKATELKHLQCLEEALKPLEEVLNLAQSKNFHLRPRDLISNINVIVLELKGSETTFMCEYADETATIVEFLNRWITFAQSIISTLTDKTHTCPPCPAPELLGGPSVFLFPPKPKDTLMISRTPEVTCVVVDVSHEDPEVKFNWYVDGVEVHNAKTKPREEQYASTYRVVSVLTVLHQDWLNGKEYKCKVSNKALPAPIEKTISKAKGQPREPQVCTLPPSRDELTKNQVSLSCAVKGFYPSDIAVEWESNGQPENNYKTTPPVLDSDGSFFLVSKLTVDKSRWQQGNVFSCSVMHEALHNHYTQKSLSLSPGGSPDLLA

SEQ ID NO: 263 - protein, 610 aa, Artificial Sequence
  Cleavage product
DKTHTCPPCPAPELLGGPSVFLFPPKPKDTLMISRTPEVTCVVVDVSHEDPEVKFNWYVDGVEVHNAKTKPREEQYASTYRVVSVLTVLHQDWLNGKEYKCKVSNKALPAPIEKTISKAKGQPREPQVYTLPPCRDELTKNQVSLWCLVKGFYPSDIAVEWESNGQPENNYKTTPPVLDSDGSFFLYSKLTVDKSRWQQGNVFSCSVMHEALHNHYTQKSLSLSPGGGSSPPGGGSSGGGSGPAPTSSSTKKTQLQLEHLLLDLQMILNGINNYKNPKLTAMLTAKFAMPKKATELKHLQCLEEALKPLEEVLNLAQSKNFHLRPRDLISNINVIVLELKGSETTFMCEYADETATIVEFLNRWITFAQSIISTLTDKTHTCPPCPAPELLGGPSVFLFPPKPKDTLMISRTPEVTCVVVDVSHEDPEVKFNWYVDGVEVHNAKTKPREEQYASTYRVVSVLTVLHQDWLNGKEYKCKVSNKALPAPIEKTISKAKGQPREPQVCTLPPSRDELTKNQVSLSCAVKGFYPSDIAVEWESNGQPENNYKTTPPVLDSDGSFFLVSKLTVDKSRWQQGNVFSCSVMHEALHNHYTQKSLSLSPGGSPGDLLA

SEQ ID NO: 264 - protein, 612 aa, Artificial Sequence
  Cleavage product
DKTHTCPPCPAPELLGGPSVFLFPPKPKDTLMISRTPEVTCVVVDVSHEDPEVKFNWYVDGVEVHNAKTKPREEQYASTYRVVSVLTVLHQDWLNGKEYKCKVSNKALPAPIEKTISKAKGQPREPQVYTLPPCRDELTKNQVSLWCLVKGFYPSDIAVEWESNGQPENNYKTTPPVLDSDGSFFLYSKLTVDKSRWQQGNVFSCSVMHEALHNHYTQKSLSLSPGGGSSPPGGGSSGGGSGPAPTSSSTKKTQLQLEHLLLDLQMILNGINNYKNPKLTAMLTAKFAMPKKATELKHLQCLEEALKPLEEVLNLAQSKNFHLRPRDLISNINVIVLELKGSETTFMCEYADETATIVEFLNRWITFAQSIISTLTDKTHTCPPCPAPELLGGPSVFLFPPKPKDTLMISRTPEVTCVVVDVSHEDPEVKFNWYVDGVEVHNAKTKPREEQYASTYRVVSVLTVLHQDWLNGKEYKCKVSNKALPAPIEKTISKAKGQPREPQVCTLPPSRDELTKNQVSLSCAVKGFYPSDIAVEWESNGQPENNYKTTPPVLDSDGSFFLVSKLTVDKSRWQQGNVFSCSVMHEALHNHYTQKSLSLSPGGSGSPSDLLA

SEQ ID NO: 265 - protein, 376 aa, Artificial Sequence; identical to SEQ ID NO: 51
  Cleavage product

SEQ ID NO: 266 - protein, 239 aa, Artificial Sequence
  Cleavage product
DKTHTCPPCPAPELLGGPSVFLFPPKPKDTLMISRTPEVTCVVVDVSHEDPEVKFNWYVDGVEVHNAKTKPREEQYASTYRVVSVLTVLHQDWLNGKEYKCKVSNKALPAPIEKTISKAKGQPREPQVCTLPPSRDELTKNQVSLSCAVKGFYPSDIAVEWESNGQPENNYKTTPPVLDSDGSFFLVSKLTVDKSRWQQGNVFSCSVMHEALHNHYTQKSLSLSPGGPPSGSSPGDSGG

SEQ ID NO: 267 - protein, 376 aa, Artificial Sequence; identical to SEQ ID NO: 51
  Cleavage product

SEQ ID NO: 268 - protein, 239 aa, Artificial Sequence
  Cleavage product
DKTHTCPPCPAPELLGGPSVFLFPPKPKDTLMISRTPEVTCVVVDVSHEDPEVKFNWYVDGVEVHNAKTKPREEQYASTYRVVSVLTVLHQDWLNGKEYKCKVSNKALPAPIEKTISKAKGQPREPQVCTLPPSRDELTKNQVSLSCAVKGFYPSDIAVEWESNGQPENNYKTTPPVLDSDGSFFLVSKLTVDKSRWQQGNVFSCSVMHEALHNHYTQKSLSLSPGGPPSGSSPGVPLS

SEQ ID NO: 269 - protein, 376 aa, Artificial Sequence; identical to SEQ ID NO: 51
  Cleavage product

SEQ ID NO: 270 - protein, 238 aa, Artificial Sequence
  Cleavage product
DKTHTCPPCPAPELLGGPSVFLFPPKPKDTLMISRTPEVTCVVVDVSHEDPEVKFNWYVDGVEVHNAKTKPREEQYASTYRVVSVLTVLHQDWLNGKEYKCKVSNKALPAPIEKTISKAKGQPREPQVCTLPPSRDELTKNQVSLSCAVKGFYPSDIAVEWESNGQPENNYKTTPPVLDSDGSFFLVSKLTVDKSRWQQGNVFSCSVMHEALHNHYTQKSLSLSPGGPPSGSSPMPYD

SEQ ID NO: 271 - protein, 376 aa, Artificial Sequence; identical to SEQ ID NO: 51
  Cleavage product

SEQ ID NO: 272 - protein, 233 aa, Artificial Sequence
  Cleavage product
DKTHTCPPCPAPELLGGPSVFLFPPKPKDTLMISRTPEVTCVVVDVSHEDPEVKFNWYVDGVEVHNAKTKPREEQYASTYRVVSVLTVLHQDWLNGKEYKCKVSNKALPAPIEKTISKAKGQPREPQVCTLPPSRDELTKNQVSLSCAVKGFYPSDIAVEWESNGQPENNYKTTPPVLDSDGSFFLVSKLTVDKSRWQQGNVFSCSVMHEALHNHYTQKSLSLSPGGSPDLLA

SEQ ID NO: 273 - protein, 376 aa, Artificial Sequence; identical to SEQ ID NO: 51
  Cleavage product

SEQ ID NO: 274 - protein, 234 aa, Artificial Sequence
  Cleavage product
DKTHTCPPCPAPELLGGPSVFLFPPKPKDTLMISRTPEVTCVVVDVSHEDPEVKFNWYVDGVEVHNAKTKPREEQYASTYRVVSVLTVLHQDWLNGKEYKCKVSNKALPAPIEKTISKAKGQPREPQVCTLPPSRDELTKNQVSLSCAVKGFYPSDIAVEWESNGQPENNYKTTPPVLDSDGSFFLVSKLTVDKSRWQQGNVFSCSVMHEALHNHYTQKSLSLSPGGSPGDLLA

SEQ ID NO: 275 - protein, 376 aa, Artificial Sequence; identical to SEQ ID NO: 51
  Cleavage product

SEQ ID NO: 276 - protein, 236 aa, Artificial Sequence
  Cleavage product
DKTHTCPPCPAPELLGGPSVFLFPPKPKDTLMISRTPEVTCVVVDVSHEDPEVKFNWYVDGVEVHNAKTKPREEQYASTYRVVSVLTVLHQDWLNGKEYKCKVSNKALPAPIEKTISKAKGQPREPQVCTLPPSRDELTKNQVSLSCAVKGFYPSDIAVEWESNGQPENNYKTTPPVLDSDGSFFLVSKLTVDKSRWQQGNVFSCSVMHEALHNHYTQKSLSLSPGGSGSPSDLLA

SEQ ID NO: 277 - protein, 5 aa, Artificial Sequence
  Linker
GGGGS

SEQ ID NO: 278 - protein, 226 aa, Artificial Sequence; identical to SEQ ID NO: 9
  Fc

SEQ ID NO: 279 - protein, 226 aa, Artificial Sequence; identical to SEQ ID NO: 12
  Fc

SEQ ID NO: 280 - protein, 227 aa, Artificial Sequence
  Fc
TIKPCPPCKCPAPNAAGGPSVFIFPPKIKDVLMISLSPIVTCVVVDVSEDDPDVQISWFVNNVEVHTAQTQTHREDYNSTLRVVSALPIQHQDWMSGKEFKCKVNNKDLGAPIERTISKPKGSVRAPQVYVLPPCEEEMTKKQVTLWCMVTDFMPEDIYVEWTNNGKTELNYKNTEPVLDSDGSYFMYSKLRVEKKNWVERNSYSCSVVHEGLHNHHTTKSFSRTPG

SEQ ID NO: 281 - protein, 227 aa, Artificial Sequence
  Fc
TIKPCPPCKCPAPNAAGGPSVFIFPPKIKDVLMISLSPIVTCVVVDVSEDDPDVQISWFVNNVEVHTAQTQTHREDYNSTLRVVSALPIQHQDWMSGKEFKCKVNNKDLGAPIERTISKPKGSVRAPQVCVLPPPEEEMTKKQVTLSCAVTDFMPEDIYVEWTNNGKTELNYKNTEPVLDSDGSYFMVSKLRVEKKNWVERNSYSCSVVHEGLHNHHTTKSFSRTPG

SEQ ID NO: 282 - protein, 243 aa, Artificial Sequence
  Fc
EVQLLESGGGLVQPGGSLRLSCAASGFTFSLFTMSVVVRQAPGKGLEVVVSAISGSGGSTYYADSVKGRFTISRDNSKNTLYLQMNSLRAEDTAVYYCAKSTHLYLFDYWGQGTLVTVSSGGGGSGGGGSGGGGSEIVLTQSPGTLSLSPGERATLSCRASQSVSMPFLAWYQQKPGQAPRLLIYGASSRATGIPDRFSGSGSGTDFTLTISRLEPEDFAVYYCQQMRGRPPTFGQGTKVEIK

SEQ ID NO: 283 - protein, 224 aa, Artificial Sequence
  Fc
VRSGCKPCICTVPEVSSVFIFPPKPKDVLTITLTPKVTCVVVAISKDDPEVQFSWFVDDVEVHTAQTQPREEQFNSTFRSVSELPIMHQDWLNGKEFKCRVNSAAFGAPIEKTISKTKGRPKAPQVYTIPPPKEQMAKDKVSLTCMITDFFPEDITVEWQWNGQPAENYDNTQPIMDTDGSYFVYSDLNVQKSNWEAGNTFTCSVLHEGLHNHHTEKSLSHSPG

SEQ ID NO: 284 - protein, 224 aa, Artificial Sequence
  Fc
VRSGCKPCICTVPEVSSVFIFPPKPKDVLTITLTPKVTCVVVAISKDDPEVQFSWFVDDVEVHTAQTQPREEQFNSTFRSVSELPIMHQDWLNGKEFKCRVNSAAFGAPIEKTISKTKGRPKAPQVYTIPPPKKQMAKDKVSLTCMITDFFPEDITVEWQWNGQPAENYKNTQPIMKTDGSYFVYSKLNVQKSNWEAGNTFTCSVLHEGLHNHHTEKSLSHSPG

SEQ ID NO: 285 - protein, 231 aa, Artificial Sequence
  Fc
EPKSSDKTHTCPPCPAPELLGGPSVFLFPPKPKDTLMISRTPEVTCVVVDVSHEDPEVKFNWYVDGVEVHNAKTKPREEQYASTYRVVSVLTVLHQDWLNGKEYKCKVSNKALPAPIEKTISKAKGQPREPQVCTLPPSRDELTKNQVSLSCAVKGFYPSDIAVEWESNGQPENNYKTTPPVLDSDGSFFLVSKLTVDKSRWQQGNVFSCSVMHEALHNHYTQKSLSLSPG

SEQ ID NO: 286 - protein, 229 aa, Artificial Sequence
  Fc
AKTDKTHTCPPCPAPELLGGPSVFLFPPKPKDTLMISRTPEVTCVVVDVSHEDPEVKFNWYVDGVEVHNAKTKPREEQYASTYRVVSVLTVLHQDWLNGKEYKCKVSNKALPAPIEKTISKAKGQPREPQVCTLPPSRDELTKNQVSLSCAVKGFYPSDIAVEWESNGQPENNYKTTPPVLDSDGSFFLVSKLTVDKSRWQQGNVFSCSVMHEALHNHYTQKSLSLSPG

SEQ ID NO: 287 - protein, 234 aa, Artificial Sequence
  Fc
AKTEPKSSDKTHTCPPCPAPELLGGPSVFLFPPKPKDTLMISRTPEVTCVVVDVSHEDPEVKFNWYVDGVEVHNAKTKPREEQYASTYRVVSVLTVLHQDWLNGKEYKCKVSNKALPAPIEKTISKAKGQPREPQVCTLPPSRDELTKNQVSLSCAVKGFYPSDIAVEWESNGQPENNYKTTPPVLDSDGSFFLVSKLTVDKSRWQQGNVFSCSVMHEALHNHYTQKSLSLSPG

SEQ ID NO: 288 - protein, 231 aa, Artificial Sequence
  Fc
EPKSSDKTHTCPPCPAPELLGGPSVFLFPPKPKDTLMISRTPEVTCVVVDVSHEDPEVKFNWYVDGVEVHNAKTKPREEQYASTYRVVSVLTVLHQDWLNGKEYKCKVSNKALPAPIEKTISKAKGQPREPQVYTLPPCRDELTKNQVSLWCLVKGFYPSDIAVEWESNGQPENNYKTTPPVLDSDGSFFLYSKLTVDKSRWQQGNVFSCSVMHEALHNHYTQKSLSLSPG

SEQ ID NO: 289 - protein, 229 aa, Artificial Sequence
  Fc
AKTDKTHTCPPCPAPELLGGPSVFLFPPKPKDTLMISRTPEVTCVVVDVSHEDPEVKFNWYVDGVEVHNAKTKPREEQYASTYRVVSVLTVLHQDWLNGKEYKCKVSNKALPAPIEKTISKAKGQPREPQVYTLPPCRDELTKNQVSLWCLVKGFYPSDIAVEWESNGQPENNYKTTPPVLDSDGSFFLYSKLTVDKSRWQQGNVFSCSVMHEALHNHYTQKSLSLSPG

SEQ ID NO: 290 - protein, 234 aa, Artificial Sequence
  Fc
AKTEPKSSDKTHTCPPCPAPELLGGPSVFLFPPKPKDTLMISRTPEVTCVVVDVSHEDPEVKFNWYVDGVEVHNAKTKPREEQYASTYRVVSVLTVLHQDWLNGKEYKCKVSNKALPAPIEKTISKAKGQPREPQVYTLPPCRDELTKNQVSLWCLVKGFYPSDIAVEWESNGQPENNYKTTPPVLDSDGSFFLYSKLTVDKSRWQQGNVFSCSVMHEALHNHYTQKSLSLSPG

SEQ ID NO: 291 - protein, 226 aa, Artificial Sequence; identical to SEQ ID NO: 10
  Fc

SEQ ID NO: 292 - protein, 226 aa, Artificial Sequence
  Fc
DKTHTCPPCPAPELLGGPSVFLFPPKPKDTLYITREPEVTCVVVDVSHEDPEVKFNWYVDGVEVHNAKTKPREEQYASTYRVVSVLTVLHQDWLNGKEYKCKVSNKALPAPIEKTISKAKGQPREPQVCTLPPSRDELTKNQVSLSCAVKGFYPSDIAVEWESNGQPENNYKTTPPVLDSDGSFFLVSKLTVDKSRWQQGNVFSCSVMHEALHNHYTQKSLSLSPG

SEQ ID NO: 293 - protein, 226 aa, Artificial Sequence; identical to SEQ ID NO: 13
  Fc

SEQ ID NO: 294 - protein, 226 aa, Artificial Sequence
  Fc
DKTHTCPPCPAPELLGGPSVFLFPPKPKDTLYITREPEVTCVVVDVSHEDPEVKFNWYVDGVEVHNAKTKPREEQYASTYRVVSVLTVLHQDWLNGKEYKCKVSNKALPAPIEKTISKAKGQPREPQVYTLPPCRDELTKNQVSLWCLVKGFYPSDIAVEWESNGQPENNYKTTPPVLDSDGSFFLYSKLTVDKSRWQQGNVFSCSVMHEALHNHYTQKSLSLSPG

SEQ ID NO: 295 - protein, 228 aa, Artificial Sequence
  Fc
ESKYGPPCPPCPAPEFLGGPSVFLFPPKPKDTLMISRTPEVTCVVVDVSQEDPEVQFNWYVDGVEVHNAKTKPREEQFNSTYRVVSVLTVLHQDWLNGKEYKCKVSNKGLPSSIEKTISKAKGQPREPQVCTLPPSQEEMTKNQVSLSCAVKGFYPSDIAVEWESNGQPENNYKTTPPVLDSDGSFFLYSRLTVDKSRWQEGNVFSCSVMHEALHNHYTQKSLSLSLG

SEQ ID NO: 296 - protein, 228 aa, Artificial Sequence
  Fc
ESKYGPPCPPCPAPEFLGGPSVFLFPPKPKDTLMISRTPEVTCVVVDVSQEDPEVQFNWYVDGVEVHNAKTKPREEQFNSTYRVVSVLTVLHQDWLNGKEYKCKVSNKGLPSSIEKTISKAKGQPREPQVYTLPPCQEEMTKNQVSLWCLVKGFYPSDIAVEWESNGQPENNYKTTPPVLDSDGSFFLYSRLTVDKSRWQEGNVFSCSVMHEALHNHYTQKSLSLSLG

SEQ ID NO: 297 - protein, 230 aa, Artificial Sequence
  Fc
ESKYGPPCPPCPAPEFLGGPSVFLFPPKPKDTLMISRTPEVTCVVVDVSQEDPEVQFNWYVDGVEVHNAKTKPREEQFNSTYRVVSVLTVLHQDWLNGKEYKCKVSNKGLPSSIEKTISKAKGQPREPQVCTLPPSQEEMTKNQVSLSCAVKGFYPSDIAVEWESNGQPENNYKTTPPVLDSDGSFFLYSRLTVDKSRWQEGNVFSCSVMHEALHNHYTQKSLSLSLGGP

SEQ ID NO: 298 - protein, 230 aa, Artificial Sequence
  Fc
ESKYGPPCPPCPAPEFLGGPSVFLFPPKPKDTLMISRTPEVTCVVVDVSQEDPEVQFNWYVDGVEVHNAKTKPREEQFNSTYRVVSVLTVLHQDWLNGKEYKCKVSNKGLPSSIEKTISKAKGQPREPQVCTLPPSQEEMTKNQVSLSCAVKGFYPSDIAVEWESNGQPENNYKTTPPVLDSDGSFFLYSRLTVDKSRWQEGNVFSCSVMHEALHNHYTQKSLSLSLGPG

SEQ ID NO: 299 - protein, 226 aa, Artificial Sequence; identical to SEQ ID NO: 8
  Fc

SEQ ID NO: 300 - protein, 226 aa, Artificial Sequence; identical to SEQ ID NO: 11
  Fc

SEQ ID NO: 301 - protein, 226 aa, Artificial Sequence
  Fc
DKTHTCPPCPAPELLGGPSVFLFPPKPKDTLMIARTPEVTCVVVDVSHEDPEVKFNWYVDGVEVHNAKTKPREEQYASTYRVVSVLTVLHQDWLNGKEYKCKVSNKALPAPIEKTISKAKGQPREPQVYTLPPCRDELTKNQVSLWCLVKGFYPSDIAVEWESNGQPENNYKTTPPVLDSDGSFFLYSKLTVDKSRWQQGNVFSCSVMHEALHNHYTQKSLSLSPG

SEQ ID NO: 302 - protein, 5 aa, Artificial Sequence
  Linker
PGSGS

SEQ ID NO: 303 - protein, 17 aa, Artificial Sequence
  Linker
GGSSPPGGGSSGGGSGP

SEQ ID NO: 304 - protein, 4 aa, Artificial Sequence
  Linker
GSPG

SEQ ID NO: 305 - protein, 4 aa, Artificial Sequence
  Linker
GSGP

SEQ ID NO: 306-307 - skipped (2 entries)

SEQ ID NO: 308 - protein, 8 aa, Artificial Sequence
  Linker
HHHHHHHH

SEQ ID NO: 309 - protein, 17 aa, Artificial Sequence
  Linker
GISSGLLSGRSDQPSGP

SEQ ID NO: 310 - protein, 9 aa, Artificial Sequence
  Linker
GPPSGSSPG

SEQ ID NO: 311 - protein, 14 aa, Artificial Sequence
  Linker
GISSGLLSGRSSGP

SEQ ID NO: 312 - protein, 8 aa, Artificial Sequence
  Linker
GPPSGSSP

SEQ ID NO: 313 - protein, 7 aa, Artificial Sequence
  Linker
PSGSSPG

SEQ ID NO: 314 - protein, 6 aa, Artificial Sequence
  Linker
GGSSPP

SEQ ID NO: 315 - protein, 4 aa, Artificial Sequence
  Linker
GGPS

SEQ ID NO: 316 - protein, 5 aa, Artificial Sequence
  Linker
GSGPS

SEQ ID NO: 317 - protein, 6 aa, Artificial Sequence
  Linker
GSSGGP

SEQ ID NO: 318 - skipped

SEQ ID NO: 319 - protein, 5 aa, Artificial Sequence
  Linker
SGSPS

SEQ ID NO: 320 - protein, 213 aa, Artificial Sequence; identical to SEQ ID NO: 4
  Masking moiety

SEQ ID NO: 321 - protein, 133 aa, Artificial Sequence; identical to SEQ ID NO: 3
  Cytokine

SEQ ID NO: 322 - protein, 6 aa, Artificial Sequence
  Cleavable peptide
VPLSLY

SEQ ID NO: 323 - protein, 8 aa, Artificial Sequence
  Cleavable peptide
DSGGFMLT

SEQ ID NO: 324 - protein, 213 aa, Artificial Sequence; identical to SEQ ID NO: 5
  Masking moiety

SEQ ID NO: 325 - protein, 18 aa, Artificial Sequence
  Cleavable peptide
NPMGSDPVNFKLLRVVNG

SEQ ID NO: 326 - protein, 214 aa, Artificial Sequence
  Masking moiety
AVKNCSHLECFYNSRANVSCMWSHEEALNVTTCHVHAKSNLRHWNKTCELTLVRQASWACNLILGSFPESQSLTSVDLLDINVVCWEEKGWRRVKTCDFHPFDNLRLVAPHSLQVLHIDTQRCNISWKVSQVSHYIEPYLEFEARRRLLGHSWEDASVLSLKQRQQWLFLEMLIPSTSYEVQVRVKAQRNNTGTWSPWSQPLTFRTRPADPMKE

SEQ ID NO: 327 - protein, 213 aa, Artificial Sequence
  Masking moiety
AVNGTSQFTCFYNSRANISCVWSQDGALQDTSCQVHAWPDRRRWNQTCELLPVSQASWACNLILGAPDSQKLTTVDIVTLRVLCREGVRWRVMAIQDFKPFENLRLMAPISLQVVHVETHRCNISWEISQASHYFERHLEFEARTLSPGHTWEEAPLLTLKQKQEWISLETLTPDTQYEFQVRVKPLQGEFTTWSPWSQPLAFRTKPAALGKD

SEQ ID NO: 328 - protein, 133 aa, Artificial Sequence
  Cytokine
APTSSSTKKTQLQLEHLLLDLQMILNGINNYKNPKLTAMLTAKFAMPKKATELKHLQCLEEALKPLEEVLNLAQSKNFHFDPRDVVSNINVFVLELKGSETTFMCEYADETATIVEFLNRWITFAQSIISTLT

SEQ ID NO: 329 - protein, 8 aa, Artificial Sequence
  Cleavable peptide
RAAAVKSP

SEQ ID NO: 330 - protein, 8 aa, Artificial Sequence
  Cleavable peptide
MPYDLYHP

SEQ ID NO: 331 - protein, 9 aa, Artificial Sequence
  Cleavable peptide
DLLAVVAAS

SEQ ID NO: 332-333 - skipped (2 entries)

SEQ ID NO: 334 - protein, 9 aa, Artificial Sequence
  Linker
GHHHHHHHH

SEQ ID NO: 335 - protein, 5 aa, Artificial Sequence
  Linker
GSGGG

SEQ ID NO: 336 - protein, 4 aa, Artificial Sequence
  Linker
SGGG

SEQ ID NO: 337 - protein, 133 aa, Artificial Sequence; identical to SEQ ID NO: 62
  Cytokine

SEQ ID NO: 338 - protein, 133 aa, Artificial Sequence; identical to SEQ ID NO: 74
  Cytokine

SEQ ID NO: 339 - protein, 133 aa, Artificial Sequence
  Cytokine
APTSSSTKKTQLQLRHLCLRLQMILNGINNYKNPKLTAMLTAKFAMPKKATELKHLQCLEEALKPLEEVLNLAQSKNFHLRPRDLISNINVIVLELKGSETTFMCEYADETATIVEFLNRWITFCQSIISTLT

SEQ ID NO: 340 - protein, 133 aa, Artificial Sequence
  Cytokine
APTSSSTKKTQLQLRHLCLRLQMILNGINNYKNPKLTAMLTAKFAMPKKATELKHLQCLEEALKPLEEVLNLAQSKNFHLRPRDLISLINVIVLELKGSETTFMCEYADETATIVEFLNRWITFCQSIISTLT

SEQ ID NO: 341 - protein, 133 aa, Artificial Sequence
  Cytokine
APTSSSTKKTQLQLLHLCLRLQMILNGINNYKNPKLTAMLTAKFAMPKKATELKHLQCLEEALKPLEEVLNLAQSKNFHLRPRDLISLINVIVLELKGSETTFMCEYADETATIVEFLNRWITFCQSIISTLT

SEQ ID NO: 342 - protein, 133 aa, Artificial Sequence
  Cytokine
APTSSSTKKTQLQLRHLCLDLQMILNGINNYKNPKLTAMLTAKFAMPKKATELKHLQCLEEALKPLEEVLNLAQSKNFHLRPRDLISLINVIVLELKGSETTFMCEYADETATIVEFLNRWITFCQSIISTLT

SEQ ID NO: 343 - protein, 133 aa, Artificial Sequence
  Cytokine
APTSSSTKKTQLQLEHLCLRLQMILNGINNYKNPKLTAMLTAKFAMPKKATELKHLQCLEEALKPLEEVLNLAQSKNFHLRPRDLISLINVIVLELKGSETTFMCEYADETATIVEFLNRWITFCQSIISTLT

SEQ ID NO: 344 - protein, 133 aa, Artificial Sequence
  Cytokine
APTSSSTKKTQLQLFHLCLRLQMILNGINNYKNPKLTAMLTAKFAMPKKATELKHLQCLEEALKPLEEVLNLAQSKNFHLRPRDLISLINVIVLELKGSETTFMCEYADETATIVEFLNRWITFCQSIISTLT

SEQ ID NO: 345 - protein, 133 aa, Artificial Sequence
  Cytokine
APTSSSTKKTQLQLEHLCLDLQMILNGINNYKNPKLTAMLTAKFAMPKKATELKHLQCLEEALKPLEEVLNLAQSKNFHLRPRDLISNINVIVLELKGSETTFMCEYADETATIVEFLNRWITFCQSIISTLT

SEQ ID NO: 346 - protein, 133 aa, Artificial Sequence
  Cytokine
APTSSSTKKTQLQLEYLLLDLQMILNGINNYKNPKLTAMLTAKFAMPKKATELKHLQCLEEALKPLEEVLNLAQSKNFHLRPRDLISNINVIVLELKGSETTFMCEYADETATIVEFLNRWITFAQSIISTLT

SEQ ID NO: 347 - protein, 133 aa, Artificial Sequence
  Cytokine
APTSSSTKKTQLQLEELLLDLQMILNGINNYKNPKLTAMLTAKFAMPKKATELKHLQCLEEALKPLEEVLNLAQSKNFHLRPRDLISNINVIVLELKGSETTFMCEYADETATIVEFLNRWITFAQSIISTLT

SEQ ID NO: 348 - protein, 133 aa, Artificial Sequence
  Cytokine
APTSSSTKKTQLQLEHLLLLLQMILNGINNYKNPKLTAMLTAKFAMPKKATELKHLQCLEEALKPLEEVLNLAQSKNFHLRPRDLISNINVIVLELKGSETTFMCEYADETATIVEFLNRWITFAQSIISTLT

SEQ ID NO: 349 - protein, 133 aa, Artificial Sequence
  Cytokine
APTSSSTKKTQLQLEYLCLDLQMILNGINNYKNPKLTAMLTAKFAMPKKATELKHLQCLEEALKPLEEVLNLAQSKNFHLRPRDLISNINVIVLELKGSETTFMCEYADETATIVEFLNRWITFCQSIISTLT

SEQ ID NO: 350 - protein, 133 aa, Artificial Sequence
  Cytokine
APTSSSTKKTQLQLEELCLDLQMILNGINNYKNPKLTAMLTAKFAMPKKATELKHLQCLEEALKPLEEVLNLAQSKNFHLRPRDLISNINVIVLELKGSETTFMCEYADETATIVEFLNRWITFCQSIISTLT

SEQ ID NO: 351 - protein, 133 aa, Artificial Sequence
  Cytokine
APTSSSTKKTQLQLEHLCLLLQMILNGINNYKNPKLTAMLTAKFAMPKKATELKHLQCLEEALKPLEEVLNLAQSKNFHLRPRDLISNINVIVLELKGSETTFMCEYADETATIVEFLNRWITFCQSIISTLT

SEQ ID NO: 352 - protein, 133 aa, Artificial Sequence
  Cytokine
APTSSSTKKTQLQLEYLCLLLQMILNGINNYKNPKLTAMLTAKFAMPKKATELKHLQCLEEALKPLEEVLNLAQSKNFHLRPRDLISNINVIVLELKGSETTFMCEYADETATIVEFLNRWITFCQSIISTLT

SEQ ID NO: 353 - protein, 133 aa, Artificial Sequence
  Cytokine
APTSSSTKKTQLQLEELCLLLQMILNGINNYKNPKLTAMLTAKFAMPKKATELKHLQCLEEALKPLEEVLNLAQSKNFHLRPRDLISNINVIVLELKGSETTFMCEYADETATIVEFLNRWITFCQSIISTLT

SEQ ID NO: 354 - protein, 444 aa, Artificial Sequence; identical to SEQ ID NO: 38
  Polypeptide chain

SEQ ID NO: 355 - protein, 376 aa, Artificial Sequence; identical to SEQ ID NO: 51
  Polypeptide chain

SEQ ID NO: 356 - protein, 372 aa, Artificial Sequence; identical to SEQ ID NO: 49
  Polypeptide chain

SEQ ID NO: 357 - protein, 374 aa, Artificial Sequence
  Polypeptide chain
DKTHTCPPCPAPELLGGPSVFLFPPKPKDTLMISRTPEVTCVVVDVSHEDPEVKFNWYVDGVEVHNAKTKPREEQYASTYRVVSVLTVLHQDWLNGKEYKCKVSNKALPAPIEKTISKAKGQPREPQVYTLPPCRDELTKNQVSLWCLVKGFYPSDIAVEWESNGQPENNYKTTPPVLDSDGSFFLYSKLTVDKSRWQQGNVFSCSVMHEALHNHYTQKSLSLSPGGSGPDSGGFMLTSGPAPTSSSTKKTQLQLEHLLLDLQMILNGINNYKNPKLTRMLTFKFYMPKKATELKHLQCLEEELKPLEEVLNLAQSKNFHLRPRDLISNINVIVLELKGSETTFMCEYADETATIVEFLNRWITFAQSIISTLT

SEQ ID NO: 358 - protein, 374 aa, Artificial Sequence; identical to SEQ ID NO: 48
  Polypeptide chain

SEQ ID NO: 359 - protein, 444 aa, Artificial Sequence; identical to SEQ ID NO: 39
  Polypeptide chain

SEQ ID NO: 360 - protein, 380 aa, Artificial Sequence
  Polypeptide chain
DKTHTCPPCPAPELLGGPSVFLFPPKPKDTLMISRTPEVTCVVVDVSHEDPEVKFNWYVDGVEVHNAKTKPREEQYASTYRVVSVLTVLHQDWLNGKEYKCKVSNKALPAPIEKTISKAKGQPREPQVYTLPPCRDELTKNQVSLWCLVKGFYPSDIAVEWESNGQPENNYKTTPPVLDSDGSFFLYSKLTVDKSRWQQGNVFSCSVMHEALHNHYTQKSLSLSPGGNPMGSDPVNFKLLRVVNGGPAPTSSSTKKTQLQLEHLLLDLQMILNGINNYKNPKLTRMLTSKFYMPKKATELKHLQCLEESLKPLEEVLNLAQSKNFHLRPRDLISNINVIVLELKGSETTFMCEYADETATIVEFLNRWITFAQSIISTLT

SEQ ID NO: 361 - protein, 377 aa, Artificial Sequence
  Polypeptide chain
TIKPCPPCKCPAPNAAGGPSVFIFPPKIKDVLMISLSPIVTCVVVDVSEDDPDVQISWFVNNVEVHTAQTQTHREDYNSTLRVVSALPIQHQDWMSGKEFKCKVNNKDLGAPIERTISKPKGSVRAPQVYVLPPCEEEMTKKQVTLWCMVTDFMPEDIYVEWTNNGKTELNYKNTEPVLDSDGSYFMYSKLRVEKKNWVERNSYSCSVVHEGLHNHHTTKSFSRTPGGGSSPPGGGSSGGGSGPAPTSSSTKKTQLQLEHLLLDLQMILNGINNYKNPKLTAMLTAKFAMPKKATELKHLQCLEEALKPLEEVLNLAQSKNFHLRPRDLISNINVIVLELKGSETTFMCEYADETATIVEFLNRWITFAQSIISTLT

SEQ ID NO: 362 - protein, 373 aa, Artificial Sequence
  Polypeptide chain
TIKPCPPCKCPAPNAAGGPSVFIFPPKIKDVLMISLSPIVTCVVVDVSEDDPDVQISWFVNNVEVHTAQTQTHREDYNSTLRVVSALPIQHQDWMSGKEFKCKVNNKDLGAPIERTISKPKGSVRAPQVYVLPPCEEEMTKKQVTLWCMVTDFMPEDIYVEWTNNGKTELNYKNTEPVLDSDGSYFMYSKLRVEKKNWVERNSYSCSVVHEGLHNHHTTKSFSRTPGGSPGVPLSLYSGPAPTSSSTKKTQLQLEHLLLDLQMILNGINNYKNPKLTAMLTAKFAMPKKATELKHLQCLEEALKPLEEVLNLAQSKNFHLRPRDLISNINVIVLELKGSETTFMCEYADETATIVEFLNRWITFAQSIISTLT

SEQ ID NO: 363 - protein, 445 aa, Artificial Sequence
  Polypeptide chain
TIKPCPPCKCPAPNAAGGPSVFIFPPKIKDVLMISLSPIVTCVVVDVSEDDPDVQISWFVNNVEVHTAQTQTHREDYNSTLRVVSALPIQHQDWMSGKEFKCKVNNKDLGAPIERTISKPKGSVRAPQVCVLPPPEEEMTKKQVTLSCAVTDFMPEDIYVEWTNNGKTELNYKNTEPVLDSDGSYFMVSKLRVEKKNWVERNSYSCSVVHEGLHNHHTTKSFSRTPGPGSGSAVNGTSQFTCFYNSRANISCVWSQDGALQDTSCQVHAWPDRRRWNQTCELLPVSQASWACNLILGAPDSQKLTTVDIVTLRVLCREGVRWRVMAIQDFKPFENLRLMAPISLQVVHVETHRCNISWEISQASHYFERHLEFEARTLSPGHTWEEAPLLTLKQKQEWICLETLTPDTQYEFQVRVKPLQGEFTTWSPWSQPLAFRTKPAALGKD

SEQ ID NO: 364 - protein, 690 aa, Artificial Sequence
  Polypeptide chain
EVQLLESGGGLVQPGGSLRLSCAASGFTFSLFTMSVVVRQAPGKGLEVVVSAISGSGGSTYYADSVKGRFTISRDNSKNTLYLQMNSLRAEDTAVYYCAKSTHLYLFDYWGQGTLVTVSSGGGGSGGGGSGGGGSEIVLTQSPGTLSLSPGERATLSCRASQSVSMPFLAWYQQKPGQAPRLLIYGASSRATGIPDRFSGSGSGTDFTLTISRLEPEDFAVYYCQQMRGRPPTFGQGTKVEIKGGSDKTHTCPPCPAPELLGGPSVFLFPPKPKDTLMISRTPEVTCVVVDVSHEDPEVKFNWYVDGVEVHNAKTKPREEQYASTYRVVSVLTVLHQDWLNGKEYKCKVSNKALPAPIEKTISKAKGQPREPQVCTLPPSRDELTKNQVSLSCAVKGFYPSDIAVEWESNGQPENNYKTTPPVLDSDGSFFLVSKLTVDKSRWQQGNVFSCSVMHEALHNHYTQKSLSLSPGPGSGSAVNGTSQFTCFYNSRANISCVWSQDGALQDTSCQVHAWPDRRRWNQTCELLPVSQASWACNLILGAPDSQKLTTVDIVTLRVLCREGVRWRVMAIQDFKPFENLRLMAPISLQVVHVETHRCNISWEISQASHYFERHLEFEARTLSPGHTWEEAPLLTLKQKQEWICLETLTPDTQYEFQVRVKPLQGEFTTWSPWSQPLAFRTKPAALGKD

SEQ ID NO: 365 - protein, 235 aa, Artificial Sequence
  Polypeptide chain
TIKPCPPCKCPAPNAAGGPSVFIFPPKIKDVLMISLSPIVTCVVVDVSEDDPDVQISWFVNNVEVHTAQTQTHREDYNSTLRVVSALPIQHQDWMSGKEFKCKVNNKDLGAPIERTISKPKGSVRAPQVCVLPPPEEEMTKKQVTLSCAVTDFMPEDIYVEWTNNGKTELNYKNTEPVLDSDGSYFMVSKLRVEKKNWVERNSYSCSVVHEGLHNHHTTKSFSRTPGHHHHHHHH

SEQ ID NO: 366 - protein, 454 aa, Artificial Sequence
  Polypeptide chain
TIKPCPPCKCPAPNAAGGPSVFIFPPKIKDVLMISLSPIVTCVVVDVSEDDPDVQISWFVNNVEVHTAQTQTHREDYNSTLRVVSALPIQHQDWMSGKEFKCKVNNKDLGAPIERTISKPKGSVRAPQVCVLPPPEEEMTKKQVTLSCAVTDFMPEDIYVEWTNNGKTELNYKNTEPVLDSDGSYFMVSKLRVEKKNWVERNSYSCSVVHEGLHNHHTTKSFSRTPGPGSGSAVNGTSQFTCFYNSRANISCVWSQDGALQDTSCQVHAWPDRRRWNQTCELLPVSQASWACNLILGAPDSQKLTTVDIVTLRVLCREGVRWRVMAIQDFKPFENLRLMAPISLQVVHVETHRCNISWEISQASHYFERHLEFEARTLSPGHTWEEAPLLTLKQKQEWICLETLTPDTQYEFQVRVKPLQGEFTTWSPWSQPLAFRTKPAALGKDGHHHHHHHH

SEQ ID NO: 367 - protein, 455 aa, Artificial Sequence
  Polypeptide chain
TIKPCPPCKCPAPNAAGGPSVFIFPPKIKDVLMISLSPIVTCVVVDVSEDDPDVQISWFVNNVEVHTAQTQTHREDYNSTLRVVSALPIQHQDWMSGKEFKCKVNNKDLGAPIERTISKPKGSVRAPQVCVLPPPEEEMTKKQVTLSCAVTDFMPEDIYVEWTNNGKTELNYKNTEPVLDSDGSYFMVSKLRVEKKNWVERNSYSCSVVHEGLHNHHTTKSFSRTPGPGSGSAVKNCSHLECFYNSRANVSCMWSHEEALNVTTCHVHAKSNLRHWNKTCELTLVRQASWACNLILGSFPESQSLTSVDLLDINVVCWEEKGWRRVKTCDFHPFDNLRLVAPHSLQVLHIDTQRCNISWKVSQVSHYIEPYLEFEARRRLLGHSWEDASVLSLKQRQQWLFLEMLIPSTSYEVQVRVKAQRNNTGTWSPWSQPLTFRTRPADPMKEGHHHHHHHH

SEQ ID NO: 368 - protein, 444 aa, Artificial Sequence
  Polypeptide chain
DKTHTCPPCPAPELLGGPSVFLFPPKPKDTLMISRTPEVTCVVVDVSHEDPEVKFNWYVDGVEVHNAKTKPREEQYASTYRVVSVLTVLHQDWLNGKEYKCKVSNKALPAPIEKTISKAKGQPREPQVCTLPPSRDELTKNQVSLSCAVKGFYPSDIAVEWESNGQPENNYKTTPPVLDSDGSFFLVSKLTVDKSRWQQGNVFSCSVMHEALHNHYTQKSLSLSPGPGSGSAVNGTSQFTCFYNSRANISCVWSQDGALQDTSCQVHAWPDRRRWNQTCELLPVSQASWACNLILGAPDSQKLTTVDIVTLRVLCREGVRWRVMAIQDFKPFENLRLMAPISLQVVHVETHRCNISWEISQASHYFERHLEFEARTLSPGHTWEEAPLLTLKQKQEWISLETLTPDTQYEFQVRVKPLQGEFTTWSPWSQPLAFRTKPAALGKD

SEQ ID NO: 369 - protein, 374 aa, Artificial Sequence
  Polypeptide chain
VRSGCKPCICTVPEVSSVFIFPPKPKDVLTITLTPKVTCVVVAISKDDPEVQFSWFVDDVEVHTAQTQPREEQFNSTFRSVSELPIMHQDWLNGKEFKCRVNSAAFGAPIEKTISKTKGRPKAPQVYTIPPPKEQMAKDKVSLTCMITDFFPEDITVEWQWNGQPAENYDNTQPIMDTDGSYFVYSDLNVQKSNWEAGNTFTCSVLHEGLHNHHTEKSLSHSPGGGSSPPGGGSSGGGSGPAPTSSSTKKTQLQLEHLLLDLQMILNGINNYKNPKLTAMLTAKFAMPKKATELKHLQCLEEALKPLEEVLNLAQSKNFHLRPRDLISNINVIVLELKGSETTFMCEYADETATIVEFLNRWITFAQSIISTLT

SEQ ID NO: 370 - protein, 370 aa, Artificial Sequence
  Polypeptide chain
VRSGCKPCICTVPEVSSVFIFPPKPKDVLTITLTPKVTCVVVAISKDDPEVQFSWFVDDVEVHTAQTQPREEQFNSTFRSVSELPIMHQDWLNGKEFKCRVNSAAFGAPIEKTISKTKGRPKAPQVYTIPPPKEQMAKDKVSLTCMITDFFPEDITVEWQWNGQPAENYDNTQPIMDTDGSYFVYSDLNVQKSNWEAGNTFTCSVLHEGLHNHHTEKSLSHSPGGSPGVPLSLYSGPAPTSSSTKKTQLQLEHLLLDLQMILNGINNYKNPKLTAMLTAKFAMPKKATELKHLQCLEEALKPLEEVLNLAQSKNFHLRPRDLISNINVIVLELKGSETTFMCEYADETATIVEFLNRWITFAQSIISTLT

SEQ ID NO: 371 - protein, 442 aa, Artificial Sequence
  Polypeptide chain
VRSGCKPCICTVPEVSSVFIFPPKPKDVLTITLTPKVTCVVVAISKDDPEVQFSWFVDDVEVHTAQTQPREEQFNSTFRSVSELPIMHQDWLNGKEFKCRVNSAAFGAPIEKTISKTKGRPKAPQVYTIPPPKKQMAKDKVSLTCMITDFFPEDITVEWQWNGQPAENYKNTQPIMKTDGSYFVYSKLNVQKSNWEAGNTFTCSVLHEGLHNHHTEKSLSHSPGPGSGSAVNGTSQFTCFYNSRANISCVWSQDGALQDTSCQVHAWPDRRRWNQTCELLPVSQASWACNLILGAPDSQKLTTVDIVTLRVLCREGVRWRVMAIQDFKPFENLRLMAPISLQVVHVETHRCNISWEISQASHYFERHLEFEARTLSPGHTWEEAPLLTLKQKQEWICLETLTPDTQYEFQVRVKPLQGEFTTWSPWSQPLAFRTKPAALGKD

SEQ ID NO: 372 - protein, 443 aa, Artificial Sequence
  Polypeptide chain
VRSGCKPCICTVPEVSSVFIFPPKPKDVLTITLTPKVTCVVVAISKDDPEVQFSWFVDDVEVHTAQTQPREEQFNSTFRSVSELPIMHQDWLNGKEFKCRVNSAAFGAPIEKTISKTKGRPKAPQVYTIPPPKKQMAKDKVSLTCMITDFFPEDITVEWQWNGQPAENYKNTQPIMKTDGSYFVYSKLNVQKSNWEAGNTFTCSVLHEGLHNHHTEKSLSHSPGPGSGSAVKNCSHLECFYNSRANVSCMWSHEEALNVTTCHVHAKSNLRHWNKTCELTLVRQASWACNLILGSFPESQSLTSVDLLDINVVCWEEKGWRRVKTCDFHPFDNLRLVAPHSLQVLHIDTQRCNISWKVSQVSHYIEPYLEFEARRRLLGHSWEDASVLSLKQRQQWLFLEMLIPSTSYEVQVRVKAQRNNTGTWSPWSQPLTFRTRPADPMKE

SEQ ID NO: 373 - protein, 376 aa, Artificial Sequence
  Polypeptide chain
DKTHTCPPCPAPELLGGPSVFLFPPKPKDTLMISRTPEVTCVVVDVSHEDPEVKFNWYVDGVEVHNAKTKPREEQYASTYRVVSVLTVLHQDWLNGKEYKCKVSNKALPAPIEKTISKAKGQPREPQVYTLPPCRDELTKNQVSLWCLVKGFYPSDIAVEWESNGQPENNYKTTPPVLDSDGSFFLYSKLTVDKSRWQQGNVFSCSVMHEALHNHYTQKSLSLSPGGISSGLLSGRSDQPSGPAPTSSSTKKTQLQLEHLLLDLQMILNGINNYKNPKLTAMLTAKFAMPKKATELKHLQCLEEALKPLEEVLNLAQSKNFHLRPRDLISNINVIVLELKGSETTFMCEYADETATIVEFLNRWITFAQSIISTLT

SEQ ID NO: 374 - protein, 459 aa, Artificial Sequence; identical to SEQ ID NO: 42
  Polypeptide chain

SEQ ID NO: 375 - protein, 372 aa, Artificial Sequence
  Polypeptide chain
DKTHTCPPCPAPELLGGPSVFLFPPKPKDTLMISRTPEVTCVVVDVSHEDPEVKFNWYVDGVEVHNAKTKPREEQYASTYRVVSVLTVLHQDWLNGKEYKCKVSNKALPAPIEKTISKAKGQPREPQVYTLPPCRDELTKNQVSLWCLVKGFYPSDIAVEWESNGQPENNYKTTPPVLDSDGSFFLYSKLTVDKSRWQQGNVFSCSVMHEALHNHYTQKSLSLSPGGSPGVPLSLYSGPAPTSSSTKKTQLQLEHLLLDLQMILNGINNYKNPKLTAMLTAKFAMPKKATELKHLQCLEEALKPLEEVLNLAQSKNFHFDPRDVVSNINVFVLELKGSETTFMCEYADETATIVEFLNRWITFAQSIISTLT

SEQ ID NO: 376 - protein, 373 aa, Artificial Sequence
  Polypeptide chain
DKTHTCPPCPAPELLGGPSVFLFPPKPKDTLMISRTPEVTCVVVDVSHEDPEVKFNWYVDGVEVHNAKTKPREEQYASTYRVVSVLTVLHQDWLNGKEYKCKVSNKALPAPIEKTISKAKGQPREPQVYTLPPCRDELTKNQVSLWCLVKGFYPSDIAVEWESNGQPENNYKTTPPVLDSDGSFFLYSKLTVDKSRWQQGNVFSCSVMHEALHNHYTQKSLSLSPGGISSGLLSGRSSGPAPTSSSTKKTQLQLEHLLLDLQMILNGINNYKNPKLTAMLTAKFAMPKKATELKHLQCLEEALKPLEEVLNLAQSKNFHLRPRDLISNINVIVLELKGSETTFMCEYADETATIVEFLNRWITFAQSIISTLT

SEQ ID NO: 377 - protein, 376 aa, Artificial Sequence
  Polypeptide chain
DKTHTCPPCPAPELLGGPSVFLFPPKPKDTLMISRTPEVTCVVVDVSHEDPEVKFNWYVDGVEVHNAKTKPREEQYASTYRVVSVLTVLHQDWLNGKEYKCKVSNKALPAPIEKTISKAKGQPREPQVYTLPPCRDELTKNQVSLWCLVKGFYPSDIAVEWESNGQPENNYKTTPPVLDSDGSFFLYSKLTVDKSRWQQGNVFSCSVMHEALHNHYTQKSLSLSPGGGSSPPGGGSSGGGSGPAPTSSSTKKTQLQLEHLLLDLQMILNGINNYKNPKLTAMLTAKFAMPKKATELKHLQCLEEALKPLEEVLNLAQSKNFHFDPRDVVSNINVFVLELKGSETTFMCEYADETATIVEFLNRWITFAQSIISTLT

SEQ ID NO: 378 - protein, 449 aa, Artificial Sequence
  Polypeptide chain
EPKSSDKTHTCPPCPAPELLGGPSVFLFPPKPKDTLMISRTPEVTCVVVDVSHEDPEVKFNWYVDGVEVHNAKTKPREEQYASTYRVVSVLTVLHQDWLNGKEYKCKVSNKALPAPIEKTISKAKGQPREPQVCTLPPSRDELTKNQVSLSCAVKGFYPSDIAVEWESNGQPENNYKTTPPVLDSDGSFFLVSKLTVDKSRWQQGNVFSCSVMHEALHNHYTQKSLSLSPGPGSGSAVNGTSQFTCFYNSRANISCVWSQDGALQDTSCQVHAWPDRRRWNQTCELLPVSQASWACNLILGAPDSQKLTTVDIVTLRVLCREGVRWRVMAIQDFKPFENLRLMAPISLQVVHVETHRCNISWEISQASHYFERHLEFEARTLSPGHTWEEAPLLTLKQKQEWICLETLTPDTQYEFQVRVKPLQGEFTTWSPWSQPLAFRTKPAALGKD

SEQ ID NO: 379 - protein, 447 aa, Artificial Sequence
  Polypeptide chain
AKTDKTHTCPPCPAPELLGGPSVFLFPPKPKDTLMISRTPEVTCVVVDVSHEDPEVKFNWYVDGVEVHNAKTKPREEQYASTYRVVSVLTVLHQDWLNGKEYKCKVSNKALPAPIEKTISKAKGQPREPQVCTLPPSRDELTKNQVSLSCAVKGFYPSDIAVEWESNGQPENNYKTTPPVLDSDGSFFLVSKLTVDKSRWQQGNVFSCSVMHEALHNHYTQKSLSLSPGPGSGSAVNGTSQFTCFYNSRANISCVWSQDGALQDTSCQVHAWPDRRRWNQTCELLPVSQASWACNLILGAPDSQKLTTVDIVTLRVLCREGVRWRVMAIQDFKPFENLRLMAPISLQVVHVETHRCNISWEISQASHYFERHLEFEARTLSPGHTWEEAPLLTLKQKQEWICLETLTPDTQYEFQVRVKPLQGEFTTWSPWSQPLAFRTKPAALGKD

SEQ ID NO: 380 - protein, 452 aa, Artificial Sequence
  Polypeptide chain
AKTEPKSSDKTHTCPPCPAPELLGGPSVFLFPPKPKDTLMISRTPEVTCVVVDVSHEDPEVKFNWYVDGVEVHNAKTKPREEQYASTYRVVSVLTVLHQDWLNGKEYKCKVSNKALPAPIEKTISKAKGQPREPQVCTLPPSRDELTKNQVSLSCAVKGFYPSDIAVEWESNGQPENNYKTTPPVLDSDGSFFLVSKLTVDKSRWQQGNVFSCSVMHEALHNHYTQKSLSLSPGPGSGSAVNGTSQFTCFYNSRANISCVWSQDGALQDTSCQVHAWPDRRRWNQTCELLPVSQASWACNLILGAPDSQKLTTVDIVTLRVLCREGVRWRVMAIQDFKPFENLRLMAPISLQVVHVETHRCNISWEISQASHYFERHLEFEARTLSPGHTWEEAPLLTLKQKQEWICLETLTPDTQYEFQVRVKPLQGEFTTWSPWSQPLAFRTKPAALGKD

SEQ ID NO: 381 - protein, 377 aa, Artificial Sequence
  Polypeptide chain
EPKSSDKTHTCPPCPAPELLGGPSVFLFPPKPKDTLMISRTPEVTCVVVDVSHEDPEVKFNWYVDGVEVHNAKTKPREEQYASTYRVVSVLTVLHQDWLNGKEYKCKVSNKALPAPIEKTISKAKGQPREPQVYTLPPCRDELTKNQVSLWCLVKGFYPSDIAVEWESNGQPENNYKTTPPVLDSDGSFFLYSKLTVDKSRWQQGNVFSCSVMHEALHNHYTQKSLSLSPGGSPGVPLSLYSGPAPTSSSTKKTQLQLEHLLLDLQMILNGINNYKNPKLTAMLTAKFAMPKKATELKHLQCLEEALKPLEEVLNLAQSKNFHLRPRDLISNINVIVLELKGSETTFMCEYADETATIVEFLNRWITFAQSIISTLT

SEQ ID NO: 382 - protein, 375 aa, Artificial Sequence
  Polypeptide chain
AKTDKTHTCPPCPAPELLGGPSVFLFPPKPKDTLMISRTPEVTCVVVDVSHEDPEVKFNWYVDGVEVHNAKTKPREEQYASTYRVVSVLTVLHQDWLNGKEYKCKVSNKALPAPIEKTISKAKGQPREPQVYTLPPCRDELTKNQVSLWCLVKGFYPSDIAVEWESNGQPENNYKTTPPVLDSDGSFFLYSKLTVDKSRWQQGNVFSCSVMHEALHNHYTQKSLSLSPGGSPGVPLSLYSGPAPTSSSTKKTQLQLEHLLLDLQMILNGINNYKNPKLTAMLTAKFAMPKKATELKHLQCLEEALKPLEEVLNLAQSKNFHLRPRDLISNINVIVLELKGSETTFMCEYADETATIVEFLNRWITFAQSIISTLT

SEQ ID NO: 383 - protein, 380 aa, Artificial Sequence
  Polypeptide chain
AKTEPKSSDKTHTCPPCPAPELLGGPSVFLFPPKPKDTLMISRTPEVTCVVVDVSHEDPEVKFNWYVDGVEVHNAKTKPREEQYASTYRVVSVLTVLHQDWLNGKEYKCKVSNKALPAPIEKTISKAKGQPREPQVYTLPPCRDELTKNQVSLWCLVKGFYPSDIAVEWESNGQPENNYKTTPPVLDSDGSFFLYSKLTVDKSRWQQGNVFSCSVMHEALHNHYTQKSLSLSPGGSPGVPLSLYSGPAPTSSSTKKTQLQLEHLLLDLQMILNGINNYKNPKLTAMLTAKFAMPKKATELKHLQCLEEALKPLEEVLNLAQSKNFHLRPRDLISNINVIVLELKGSETTFMCEYADETATIVEFLNRWITFAQSIISTLT

SEQ ID NO: 384 - protein, 460 aa, Artificial Sequence; identical to SEQ ID NO: 41
  Polypeptide chain

SEQ ID NO: 385 - protein, 372 aa, Artificial Sequence
  Polypeptide chain
DKTHTCPPCPAPELLGGPSVFLFPPKPKDTLMISRTPEVTCVVVDVSHEDPEVKFNWYVDGVEVHNAKTKPREEQYASTYRVVSVLTVLHQDWLNGKEYKCKVSNKALPAPIEKTISKAKGQPREPQVYTLPPCRDELTKNQVSLWCLVKGFYPSDIAVEWESNGQPENNYKTTPPVLDSDGSFFLYSKLTVDKSRWQQGNVFSCSVMHEALHNHYTQKSLSLSPGGSPGVPLSLYSGPAPTSSSTKKTQLQLRHLCLRLQMILNGINNYKNPKLTAMLTAKFAMPKKATELKHLQCLEEALKPLEEVLNLAQSKNFHLRPRDLISNINVIVLELKGSETTFMCEYADETATIVEFLNRWITFCQSIISTLT

SEQ ID NO: 386 - protein, 372 aa, Artificial Sequence
  Polypeptide chain
DKTHTCPPCPAPELLGGPSVFLFPPKPKDTLMISRTPEVTCVVVDVSHEDPEVKFNWYVDGVEVHNAKTKPREEQYASTYRVVSVLTVLHQDWLNGKEYKCKVSNKALPAPIEKTISKAKGQPREPQVYTLPPCRDELTKNQVSLWCLVKGFYPSDIAVEWESNGQPENNYKTTPPVLDSDGSFFLYSKLTVDKSRWQQGNVFSCSVMHEALHNHYTQKSLSLSPGGSPGVPLSLYSGPAPTSSSTKKTQLQLRHLCLRLQMILNGINNYKNPKLTAMLTAKFAMPKKATELKHLQCLEEALKPLEEVLNLAQSKNFHLRPRDLISLINVIVLELKGSETTFMCEYADETATIVEFLNRWITFCQSIISTLT

SEQ ID NO: 387 - protein, 372 aa, Artificial Sequence
  Polypeptide chain
DKTHTCPPCPAPELLGGPSVFLFPPKPKDTLMISRTPEVTCVVVDVSHEDPEVKFNWYVDGVEVHNAKTKPREEQYASTYRVVSVLTVLHQDWLNGKEYKCKVSNKALPAPIEKTISKAKGQPREPQVYTLPPCRDELTKNQVSLWCLVKGFYPSDIAVEWESNGQPENNYKTTPPVLDSDGSFFLYSKLTVDKSRWQQGNVFSCSVMHEALHNHYTQKSLSLSPGGSPGVPLSLYSGPAPTSSSTKKTQLQLLHLCLRLQMILNGINNYKNPKLTAMLTAKFAMPKKATELKHLQCLEEALKPLEEVLNLAQSKNFHLRPRDLISLINVIVLELKGSETTFMCEYADETATIVEFLNRWITFCQSIISTLT

SEQ ID NO: 388 - protein, 372 aa, Artificial Sequence
  Polypeptide chain
DKTHTCPPCPAPELLGGPSVFLFPPKPKDTLMISRTPEVTCVVVDVSHEDPEVKFNWYVDGVEVHNAKTKPREEQYASTYRVVSVLTVLHQDWLNGKEYKCKVSNKALPAPIEKTISKAKGQPREPQVYTLPPCRDELTKNQVSLWCLVKGFYPSDIAVEWESNGQPENNYKTTPPVLDSDGSFFLYSKLTVDKSRWQQGNVFSCSVMHEALHNHYTQKSLSLSPGGSPGVPLSLYSGPAPTSSSTKKTQLQLRHLCLDLQMILNGINNYKNPKLTAMLTAKFAMPKKATELKHLQCLEEALKPLEEVLNLAQSKNFHLRPRDLISLINVIVLELKGSETTFMCEYADETATIVEFLNRWITFCQSIISTLT

SEQ ID NO: 389 - protein, 372 aa, Artificial Sequence
  Polypeptide chain
DKTHTCPPCPAPELLGGPSVFLFPPKPKDTLMISRTPEVTCVVVDVSHEDPEVKFNWYVDGVEVHNAKTKPREEQYASTYRVVSVLTVLHQDWLNGKEYKCKVSNKALPAPIEKTISKAKGQPREPQVYTLPPCRDELTKNQVSLWCLVKGFYPSDIAVEWESNGQPENNYKTTPPVLDSDGSFFLYSKLTVDKSRWQQGNVFSCSVMHEALHNHYTQKSLSLSPGGSPGVPLSLYSGPAPTSSSTKKTQLQLEHLCLRLQMILNGINNYKNPKLTAMLTAKFAMPKKATELKHLQCLEEALKPLEEVLNLAQSKNFHLRPRDLISLINVIVLELKGSETTFMCEYADETATIVEFLNRWITFCQSIISTLT

SEQ ID NO: 390 - protein, 372 aa, Artificial Sequence
  Polypeptide chain
DKTHTCPPCPAPELLGGPSVFLFPPKPKDTLMISRTPEVTCVVVDVSHEDPEVKFNWYVDGVEVHNAKTKPREEQYASTYRVVSVLTVLHQDWLNGKEYKCKVSNKALPAPIEKTISKAKGQPREPQVYTLPPCRDELTKNQVSLWCLVKGFYPSDIAVEWESNGQPENNYKTTPPVLDSDGSFFLYSKLTVDKSRWQQGNVFSCSVMHEALHNHYTQKSLSLSPGGSPGVPLSLYSGPAPTSSSTKKTQLQLFHLCLRLQMILNGINNYKNPKLTAMLTAKFAMPKKATELKHLQCLEEALKPLEEVLNLAQSKNFHLRPRDLISLINVIVLELKGSETTFMCEYADETATIVEFLNRWITFCQSIISTLT

SEQ ID NO: 391 - protein, 444 aa, Artificial Sequence; identical to SEQ ID NO: 43
  Polypeptide chain

SEQ ID NO: 392 - protein, 444 aa, Artificial Sequence
  Polypeptide chain
DKTHTCPPCPAPELLGGPSVFLFPPKPKDTLYITREPEVTCVVVDVSHEDPEVKFNWYVDGVEVHNAKTKPREEQYASTYRVVSVLTVLHQDWLNGKEYKCKVSNKALPAPIEKTISKAKGQPREPQVCTLPPSRDELTKNQVSLSCAVKGFYPSDIAVEWESNGQPENNYKTTPPVLDSDGSFFLVSKLTVDKSRWQQGNVFSCSVMHEALHNHYTQKSLSLSPGPGSGSAVNGTSQFTCFYNSRANISCVWSQDGALQDTSCQVHAWPDRRRWNQTCELLPVSQASWACNLILGAPDSQKLTTVDIVTLRVLCREGVRWRVMAIQDFKPFENLRLMAPISLQVVHVETHRCNISWEISQASHYFERHLEFEARTLSPGHTWEEAPLLTLKQKQEWICLETLTPDTQYEFQVRVKPLQGEFTTWSPWSQPLAFRTKPAALGKD

SEQ ID NO: 393 - protein, 376 aa, Artificial Sequence
  Polypeptide chain
DKTHTCPPCPAPELLGGPSVFLFPPKPKDTLMASRTPEVTCVVVDVSHEDPEVKFNWYVDGVEVHNAKTKPREEQYASTYRVVSVLTVLHQDWLNGKEYKCKVSNKALPAPIEKTISKAKGQPREPQVYTLPPCRDELTKNQVSLWCLVKGFYPSDIAVEWESNGQPENNYKTTPPVLDSDGSFFLYSKLTVDKSRWQQGNVFSCSVMHEALHNHYTQKSLSLSPGGGSSPPGGGSSGGGSGPAPTSSSTKKTQLQLEHLLLDLQMILNGINNYKNPKLTAMLTAKFAMPKKATELKHLQCLEEALKPLEEVLNLAQSKNFHLRPRDLISNINVIVLELKGSETTFMCEYADETATIVEFLNRWITFAQSIISTLT

SEQ ID NO: 394 - protein, 376 aa, Artificial Sequence
  Polypeptide chain
DKTHTCPPCPAPELLGGPSVFLFPPKPKDTLYITREPEVTCVVVDVSHEDPEVKFNWYVDGVEVHNAKTKPREEQYASTYRVVSVLTVLHQDWLNGKEYKCKVSNKALPAPIEKTISKAKGQPREPQVYTLPPCRDELTKNQVSLWCLVKGFYPSDIAVEWESNGQPENNYKTTPPVLDSDGSFFLYSKLTVDKSRWQQGNVFSCSVMHEALHNHYTQKSLSLSPGGGSSPPGGGSSGGGSGPAPTSSSTKKTQLQLEHLLLDLQMILNGINNYKNPKLTAMLTAKFAMPKKATELKHLQCLEEALKPLEEVLNLAQSKNFHLRPRDLISNINVIVLELKGSETTFMCEYADETATIVEFLNRWITFAQSIISTLT

SEQ ID NO: 395 - protein, 372 aa, Artificial Sequence; identical to SEQ ID NO: 50
  Polypeptide chain

SEQ ID NO: 396 - protein, 372 aa, Artificial Sequence
  Polypeptide chain
DKTHTCPPCPAPELLGGPSVFLFPPKPKDTLYITREPEVTCVVVDVSHEDPEVKFNWYVDGVEVHNAKTKPREEQYASTYRVVSVLTVLHQDWLNGKEYKCKVSNKALPAPIEKTISKAKGQPREPQVYTLPPCRDELTKNQVSLWCLVKGFYPSDIAVEWESNGQPENNYKTTPPVLDSDGSFFLYSKLTVDKSRWQQGNVFSCSVMHEALHNHYTQKSLSLSPGGSPGVPLSLYSGPAPTSSSTKKTQLQLEHLLLDLQMILNGINNYKNPKLTAMLTAKFAMPKKATELKHLQCLEEALKPLEEVLNLAQSKNFHLRPRDLISNINVIVLELKGSETTFMCEYADETATIVEFLNRWITFAQSIISTLT

SEQ ID NO: 397 - protein, 372 aa, Artificial Sequence
  Polypeptide chain
DKTHTCPPCPAPELLGGPSVFLFPPKPKDTLMISRTPEVTCVVVDVSHEDPEVKFNWYVDGVEVHNAKTKPREEQYASTYRVVSVLTVLHQDWLNGKEYKCKVSNKALPAPIEKTISKAKGQPREPQVYTLPPCRDELTKNQVSLWCLVKGFYPSDIAVEWESNGQPENNYKTTPPVLDSDGSFFLYSKLTVDKSRWQQGNVFSCSVMHEALHNHYTQKSLSLSPGGSPGVPLSLYSGPAPTSSSTKKTQLQLEHLCLDLQMILNGINNYKNPKLTAMLTAKFAMPKKATELKHLQCLEEALKPLEEVLNLAQSKNFHLRPRDLISNINVIVLELKGSETTFMCEYADETATIVEFLNRWITFCQSIISTLT

SEQ ID NO: 398 - protein, 372 aa, Artificial Sequence
  Polypeptide chain
DKTHTCPPCPAPELLGGPSVFLFPPKPKDTLMISRTPEVTCVVVDVSHEDPEVKFNWYVDGVEVHNAKTKPREEQYASTYRVVSVLTVLHQDWLNGKEYKCKVSNKALPAPIEKTISKAKGQPREPQVYTLPPCRDELTKNQVSLWCLVKGFYPSDIAVEWESNGQPENNYKTTPPVLDSDGSFFLYSKLTVDKSRWQQGNVFSCSVMHEALHNHYTQKSLSLSPGGSPGVPLSLYSGPAPTSSSTKKTQLQLEYLLLDLQMILNGINNYKNPKLTAMLTAKFAMPKKATELKHLQCLEEALKPLEEVLNLAQSKNFHLRPRDLISNINVIVLELKGSETTFMCEYADETATIVEFLNRWITFAQSIISTLT

SEQ ID NO: 399 - protein, 372 aa, Artificial Sequence
  Polypeptide chain
DKTHTCPPCPAPELLGGPSVFLFPPKPKDTLMISRTPEVTCVVVDVSHEDPEVKFNWYVDGVEVHNAKTKPREEQYASTYRVVSVLTVLHQDWLNGKEYKCKVSNKALPAPIEKTISKAKGQPREPQVYTLPPCRDELTKNQVSLWCLVKGFYPSDIAVEWESNGQPENNYKTTPPVLDSDGSFFLYSKLTVDKSRWQQGNVFSCSVMHEALHNHYTQKSLSLSPGGSPGVPLSLYSGPAPTSSSTKKTQLQLEELLLDLQMILNGINNYKNPKLTAMLTAKFAMPKKATELKHLQCLEEALKPLEEVLNLAQSKNFHLRPRDLISNINVIVLELKGSETTFMCEYADETATIVEFLNRWITFAQSIISTLT

SEQ ID NO: 400 - protein, 372 aa, Artificial Sequence
  Polypeptide chain
DKTHTCPPCPAPELLGGPSVFLFPPKPKDTLMISRTPEVTCVVVDVSHEDPEVKFNWYVDGVEVHNAKTKPREEQYASTYRVVSVLTVLHQDWLNGKEYKCKVSNKALPAPIEKTISKAKGQPREPQVYTLPPCRDELTKNQVSLWCLVKGFYPSDIAVEWESNGQPENNYKTTPPVLDSDGSFFLYSKLTVDKSRWQQGNVFSCSVMHEALHNHYTQKSLSLSPGGSPGVPLSLYSGPAPTSSSTKKTQLQLEHLLLLLQMILNGINNYKNPKLTAMLTAKFAMPKKATELKHLQCLEEALKPLEEVLNLAQSKNFHLRPRDLISNINVIVLELKGSETTFMCEYADETATIVEFLNRWITFAQSIISTLT

SEQ ID NO: 401 - protein, 372 aa, Artificial Sequence
  Polypeptide chain
DKTHTCPPCPAPELLGGPSVFLFPPKPKDTLMISRTPEVTCVVVDVSHEDPEVKFNWYVDGVEVHNAKTKPREEQYASTYRVVSVLTVLHQDWLNGKEYKCKVSNKALPAPIEKTISKAKGQPREPQVYTLPPCRDELTKNQVSLWCLVKGFYPSDIAVEWESNGQPENNYKTTPPVLDSDGSFFLYSKLTVDKSRWQQGNVFSCSVMHEALHNHYTQKSLSLSPGGSPGVPLSLYSGPAPTSSSTKKTQLQLEYLCLDLQMILNGINNYKNPKLTAMLTAKFAMPKKATELKHLQCLEEALKPLEEVLNLAQSKNFHLRPRDLISNINVIVLELKGSETTFMCEYADETATIVEFLNRWITFCQSIISTLT

SEQ ID NO: 402 - protein, 372 aa, Artificial Sequence
  Polypeptide chain
DKTHTCPPCPAPELLGGPSVFLFPPKPKDTLMISRTPEVTCVVVDVSHEDPEVKFNWYVDGVEVHNAKTKPREEQYASTYRVVSVLTVLHQDWLNGKEYKCKVSNKALPAPIEKTISKAKGQPREPQVYTLPPCRDELTKNQVSLWCLVKGFYPSDIAVEWESNGQPENNYKTTPPVLDSDGSFFLYSKLTVDKSRWQQGNVFSCSVMHEALHNHYTQKSLSLSPGGSPGVPLSLYSGPAPTSSSTKKTQLQLEELCLDLQMILNGINNYKNPKLTAMLTAKFAMPKKATELKHLQCLEEALKPLEEVLNLAQSKNFHLRPRDLISNINVIVLELKGSETTFMCEYADETATIVEFLNRWITFCQSIISTLT

SEQ ID NO: 403 - protein, 372 aa, Artificial Sequence
  Polypeptide chain
DKTHTCPPCPAPELLGGPSVFLFPPKPKDTLMISRTPEVTCVVVDVSHEDPEVKFNWYVDGVEVHNAKTKPREEQYASTYRVVSVLTVLHQDWLNGKEYKCKVSNKALPAPIEKTISKAKGQPREPQVYTLPPCRDELTKNQVSLWCLVKGFYPSDIAVEWESNGQPENNYKTTPPVLDSDGSFFLYSKLTVDKSRWQQGNVFSCSVMHEALHNHYTQKSLSLSPGGSPGVPLSLYSGPAPTSSSTKKTQLQLEHLCLLLQMILNGINNYKNPKLTAMLTAKFAMPKKATELKHLQCLEEALKPLEEVLNLAQSKNFHLRPRDLISNINVIVLELKGSETTFMCEYADETATIVEFLNRWITFCQSIISTLT

SEQ ID NO: 404 - protein, 372 aa, Artificial Sequence
  Polypeptide chain
DKTHTCPPCPAPELLGGPSVFLFPPKPKDTLMISRTPEVTCVVVDVSHEDPEVKFNWYVDGVEVHNAKTKPREEQYASTYRVVSVLTVLHQDWLNGKEYKCKVSNKALPAPIEKTISKAKGQPREPQVYTLPPCRDELTKNQVSLWCLVKGFYPSDIAVEWESNGQPENNYKTTPPVLDSDGSFFLYSKLTVDKSRWQQGNVFSCSVMHEALHNHYTQKSLSLSPGGSPGVPLSLYSGPAPTSSSTKKTQLQLEYLCLLLQMILNGINNYKNPKLTAMLTAKFAMPKKATELKHLQCLEEALKPLEEVLNLAQSKNFHLRPRDLISNINVIVLELKGSETTFMCEYADETATIVEFLNRWITFCQSIISTLT

SEQ ID NO: 405 - protein, 372 aa, Artificial Sequence
  Polypeptide chain
DKTHTCPPCPAPELLGGPSVFLFPPKPKDTLMISRTPEVTCVVVDVSHEDPEVKFNWYVDGVEVHNAKTKPREEQYASTYRVVSVLTVLHQDWLNGKEYKCKVSNKALPAPIEKTISKAKGQPREPQVYTLPPCRDELTKNQVSLWCLVKGFYPSDIAVEWESNGQPENNYKTTPPVLDSDGSFFLYSKLTVDKSRWQQGNVFSCSVMHEALHNHYTQKSLSLSPGGSPGVPLSLYSGPAPTSSSTKKTQLQLEELCLLLQMILNGINNYKNPKLTAMLTAKFAMPKKATELKHLQCLEEALKPLEEVLNLAQSKNFHLRPRDLISNINVIVLELKGSETTFMCEYADETATIVEFLNRWITFCQSIISTLT

SEQ ID NO: 406 - protein, 446 aa, Artificial Sequence
  Polypeptide chain
ESKYGPPCPPCPAPEFLGGPSVFLFPPKPKDTLMISRTPEVTCVVVDVSQEDPEVQFNWYVDGVEVHNAKTKPREEQFNSTYRVVSVLTVLHQDWLNGKEYKCKVSNKGLPSSIEKTISKAKGQPREPQVCTLPPSQEEMTKNQVSLSCAVKGFYPSDIAVEWESNGQPENNYKTTPPVLDSDGSFFLYSRLTVDKSRWQEGNVFSCSVMHEALHNHYTQKSLSLSLGPGSGSAVNGTSQFTCFYNSRANISCVWSQDGALQDTSCQVHAWPDRRRWNQTCELLPVSQASWACNLILGAPDSQKLTTVDIVTLRVLCREGVRWRVMAIQDFKPFENLRLMAPISLQVVHVETHRCNISWEISQASHYFERHLEFEARTLSPGHTWEEAPLLTLKQKQEWICLETLTPDTQYEFQVRVKPLQGEFTTWSPWSQPLAFRTKPAALGKD

SEQ ID NO: 407 - protein, 378 aa, Artificial Sequence
  Polypeptide chain
ESKYGPPCPPCPAPEFLGGPSVFLFPPKPKDTLMISRTPEVTCVVVDVSQEDPEVQFNWYVDGVEVHNAKTKPREEQFNSTYRVVSVLTVLHQDWLNGKEYKCKVSNKGLPSSIEKTISKAKGQPREPQVYTLPPCQEEMTKNQVSLWCLVKGFYPSDIAVEWESNGQPENNYKTTPPVLDSDGSFFLYSRLTVDKSRWQEGNVFSCSVMHEALHNHYTQKSLSLSLGGGSSPPGGGSSGGGSGPAPTSSSTKKTQLQLEHLLLDLQMILNGINNYKNPKLTAMLTAKFAMPKKATELKHLQCLEEALKPLEEVLNLAQSKNFHLRPRDLISNINVIVLELKGSETTFMCEYADETATIVEFLNRWITFAQSIISTLT

SEQ ID NO: 408 - protein, 374 aa, Artificial Sequence
  Polypeptide chain
ESKYGPPCPPCPAPEFLGGPSVFLFPPKPKDTLMISRTPEVTCVVVDVSQEDPEVQFNWYVDGVEVHNAKTKPREEQFNSTYRVVSVLTVLHQDWLNGKEYKCKVSNKGLPSSIEKTISKAKGQPREPQVYTLPPCQEEMTKNQVSLWCLVKGFYPSDIAVEWESNGQPENNYKTTPPVLDSDGSFFLYSRLTVDKSRWQEGNVFSCSVMHEALHNHYTQKSLSLSLGGSPGVPLSLYSGPAPTSSSTKKTQLQLEHLLLDLQMILNGINNYKNPKLTAMLTAKFAMPKKATELKHLQCLEEALKPLEEVLNLAQSKNFHLRPRDLISNINVIVLELKGSETTFMCEYADETATIVEFLNRWITFAQSIISTLT

SEQ ID NO: 409 - protein, 459 aa, Artificial Sequence
  Polypeptide chain
DKTHTCPPCPAPELLGGPSVFLFPPKPKDTLMISRTPEVTCVVVDVSHEDPEVKFNWYVDGVEVHNAKTKPREEQYASTYRVVSVLTVLHQDWLNGKEYKCKVSNKALPAPIEKTISKAKGQPREPQVCTLPPSRDELTKNQVSLSCAVKGFYPSDIAVEWESNGQPENNYKTTPPVLDSDGSFFLVSKLTVDKSRWQQGNVFSCSVMHEALHNHYTQKSLSLSPGGPPSGSSPRAAAVKSPSGGGAVNGTSQFTCFYNSRANISCVWSQDGALQDTSCQVHAWPDRRRWNQTCELLPVSQASWACNLILGAPDSQKLTTVDIVTLRVLCREGVRWRVMAIQDFKPFENLRLMAPISLQVVHVETHRCNISWEISQASHYFERHLEFEARTLSPGHTWEEAPLLTLKQKQEWICLETLTPDTQYEFQVRVKPLQGEFTTWSPWSQPLAFRTKPAALGKD

SEQ ID NO: 410 - protein, 459 aa, Artificial Sequence
  Polypeptide chain
DKTHTCPPCPAPELLGGPSVFLFPPKPKDTLMASRTPEVTCVVVDVSHEDPEVKFNWYVDGVEVHNAKTKPREEQYASTYRVVSVLTVLHQDWLNGKEYKCKVSNKALPAPIEKTISKAKGQPREPQVCTLPPSRDELTKNQVSLSCAVKGFYPSDIAVEWESNGQPENNYKTTPPVLDSDGSFFLVSKLTVDKSRWQQGNVFSCSVMHEALHNHYTQKSLSLSPGGPPSGSSPMPYDLYHPSGGGAVNGTSQFTCFYNSRANISCVWSQDGALQDTSCQVHAWPDRRRWNQTCELLPVSQASWACNLILGAPDSQKLTTVDIVTLRVLCREGVRWRVMAIQDFKPFENLRLMAPISLQVVHVETHRCNISWEISQASHYFERHLEFEARTLSPGHTWEEAPLLTLKQKQEWICLETLTPDTQYEFQVRVKPLQGEFTTWSPWSQPLAFRTKPAALGKD

SEQ ID NO: 411 - protein, 459 aa, Artificial Sequence
  Polypeptide chain
DKTHTCPPCPAPELLGGPSVFLFPPKPKDTLMASRTPEVTCVVVDVSHEDPEVKFNWYVDGVEVHNAKTKPREEQYASTYRVVSVLTVLHQDWLNGKEYKCKVSNKALPAPIEKTISKAKGQPREPQVCTLPPSRDELTKNQVSLSCAVKGFYPSDIAVEWESNGQPENNYKTTPPVLDSDGSFFLVSKLTVDKSRWQQGNVFSCSVMHEALHNHYTQKSLSLSPGGPPSGSSPGVPLSLYGSGGGAVNGTSQFTCFYNSRANISCVWSQDGALQDTSCQVHAWPDRRRWNQTCELLPVSQASWACNLILGAPDSQKLTTVDIVTLRVLCREGVRWRVMAIQDFKPFENLRLMAPISLQVVHVETHRCNISWEISQASHYFERHLEFEARTLSPGHTWEEAPLLTLKQKQEWICLETLTPDTQYEFQVRVKPLQGEFTTWSPWSQPLAFRTKPAALGKD

SEQ ID NO: 412 - protein, 459 aa, Artificial Sequence; identical to SEQ ID NO: 40
  Polypeptide chain

SEQ ID NO: 413 - protein, 460 aa, Artificial Sequence
  Polypeptide chain
DKTHTCPPCPAPELLGGPSVFLFPPKPKDTLMISRTPEVTCVVVDVSHEDPEVKFNWYVDGVEVHNAKTKPREEQYASTYRVVSVLTVLHQDWLNGKEYKCKVSNKALPAPIEKTISKAKGQPREPQVCTLPPSRDELTKNQVSLSCAVKGFYPSDIAVEWESNGQPENNYKTTPPVLDSDGSFFLVSKLTVDKSRWQQGNVFSCSVMHEALHNHYTQKSLSLSPGGPPSGSSPGDSGGFMLTSGGGAVNGTSQFTCFYNSRANISCVWSQDGALQDTSCQVHAWPDRRRWNQTCELLPVSQASWACNLILGAPDSQKLTTVDIVTLRVLCREGVRWRVMAIQDFKPFENLRLMAPISLQVVHVETHRSNISWEISQASHYFERHLEFEARTLSPGHTWEEAPLLTLKQKQEWISLETLTPDTQYEFQVRVKPLQGEFTTWSPWSQPLAFRTKPAALGKD

SEQ ID NO: 414 - protein, 461 aa, Artificial Sequence
  Polypeptide chain
ESKYGPPCPPCPAPEFLGGPSVFLFPPKPKDTLMISRTPEVTCVVVDVSQEDPEVQFNWYVDGVEVHNAKTKPREEQFNSTYRVVSVLTVLHQDWLNGKEYKCKVSNKGLPSSIEKTISKAKGQPREPQVCTLPPSQEEMTKNQVSLSCAVKGFYPSDIAVEWESNGQPENNYKTTPPVLDSDGSFFLYSRLTVDKSRWQEGNVFSCSVMHEALHNHYTQKSLSLSLGGPPSGSSPGVPLSLYGSGGGAVNGTSQFTCFYNSRANISCVWSQDGALQDTSCQVHAWPDRRRWNQTCELLPVSQASWACNLILGAPDSQKLTTVDIVTLRVLCREGVRWRVMAIQDFKPFENLRLMAPISLQVVHVETHRCNISWEISQASHYFERHLEFEARTLSPGHTWEEAPLLTLKQKQEWICLETLTPDTQYEFQVRVKPLQGEFTTWSPWSQPLAFRTKPAALGKD

SEQ ID NO: 415 - protein, 376 aa, Artificial Sequence
  Polypeptide chain
DKTHTCPPCPAPELLGGPSVFLFPPKPKDTLMASRTPEVTCVVVDVSHEDPEVKFNWYVDGVEVHNAKTKPREEQYASTYRVVSVLTVLHQDWLNGKEYKCKVSNKALPAPIEKTISKAKGQPREPQVYTLPPCRDELTKNQVSLWCLVKGFYPSDIAVEWESNGQPENNYKTTPPVLDSDGSFFLYSKLTVDKSRWQQGNVFSCSVMHEALHNHYTQKSLSLSPGGGSSPPMPYDLYHPSGPAPTSSSTKKTQLQLEHLLLDLQMILNGINNYKNPKLTAMLTAKFAMPKKATELKHLQCLEEALKPLEEVLNLAQSKNFHLRPRDLISNINVIVLELKGSETTFMCEYADETATIVEFLNRWITFAQSIISTLT

SEQ ID NO: 416 - protein, 375 aa, Artificial Sequence
  Polypeptide chain
DKTHTCPPCPAPELLGGPSVFLFPPKPKDTLMASRTPEVTCVVVDVSHEDPEVKFNWYVDGVEVHNAKTKPREEQYASTYRVVSVLTVLHQDWLNGKEYKCKVSNKALPAPIEKTISKAKGQPREPQVYTLPPCRDELTKNQVSLWCLVKGFYPSDIAVEWESNGQPENNYKTTPPVLDSDGSFFLYSKLTVDKSRWQQGNVFSCSVMHEALHNHYTQKSLSLSPGGGPSDLLAVVAASSGPAPTSSSTKKTQLQLEHLLLDLQMILNGINNYKNPKLTAMLTAKFAMPKKATELKHLQCLEEALKPLEEVLNLAQSKNFHLRPRDLISNINVIVLELKGSETTFMCEYADETATIVEFLNRWITFAQSIISTLT

SEQ ID NO: 417 - protein, 376 aa, Artificial Sequence
  Polypeptide chain
DKTHTCPPCPAPELLGGPSVFLFPPKPKDTLMASRTPEVTCVVVDVSHEDPEVKFNWYVDGVEVHNAKTKPREEQYASTYRVVSVLTVLHQDWLNGKEYKCKVSNKALPAPIEKTISKAKGQPREPQVYTLPPCRDELTKNQVSLWCLVKGFYPSDIAVEWESNGQPENNYKTTPPVLDSDGSFFLYSKLTVDKSRWQQGNVFSCSVMHEALHNHYTQKSLSLSPGGSGPSDLLAVVAASSGPAPTSSSTKKTQLQLEHLLLDLQMILNGINNYKNPKLTAMLTAKFAMPKKATELKHLQCLEEALKPLEEVLNLAQSKNFHLRPRDLISNINVIVLELKGSETTFMCEYADETATIVEFLNRWITFAQSIISTLT

SEQ ID NO: 418 - protein, 377 aa, Artificial Sequence
  Polypeptide chain
DKTHTCPPCPAPELLGGPSVFLFPPKPKDTLMASRTPEVTCVVVDVSHEDPEVKFNWYVDGVEVHNAKTKPREEQYASTYRVVSVLTVLHQDWLNGKEYKCKVSNKALPAPIEKTISKAKGQPREPQVYTLPPCRDELTKNQVSLWCLVKGFYPSDIAVEWESNGQPENNYKTTPPVLDSDGSFFLYSKLTVDKSRWQQGNVFSCSVMHEALHNHYTQKSLSLSPGGSSGGPDLLAVVAASSGPAPTSSSTKKTQLQLEHLLLDLQMILNGINNYKNPKLTAMLTAKFAMPKKATELKHLQCLEEALKPLEEVLNLAQSKNFHLRPRDLISNINVIVLELKGSETTFMCEYADETATIVEFLNRWITFAQSIISTLT

SEQ ID NO: 419 - protein, 454 aa, Artificial Sequence; identical to SEQ ID NO: 255
  Polypeptide chain

SEQ ID NO: 420 - protein, 455 aa, Artificial Sequence; identical to SEQ ID NO: 256
  Polypeptide chain

SEQ ID NO: 421 - protein, 456 aa, Artificial Sequence; identical to SEQ ID NO: 257
  Polypeptide chain

SEQ ID NO: 422 - protein, 444 aa, Artificial Sequence
  Polypeptide chain
DKTHTCPPCPAPELLGGPSVFLFPPKPKDTLMISRTPEVTCVVVDVSHEDPEVKFNWYVDGVEVHNAKTKPREEQYNSTYRVVSVLTVLHQDWLNGKEYKCKVSNKALPAPIEKTISKAKGQPREPQVCTLPPSRDELTKNQVSLSCAVKGFYPSDIAVEWESNGQPENNYKTTPPVLDSDGSFFLVSKLTVDKSRWQQGNVFSCSVMHEALHNHYTQKSLSLSPGPGSGSAVNGTSQFTCFYNSRANISCVWSQDGALQDTSCQVHAWPDRRRWNQTCELLPVSQASWACNLILGAPDSQKLTTVDIVTLRVLCREGVRWRVMAIQDFKPFENLRLMAPISLQVVHVETHRCNISWEISQASHYFERHLEFEARTLSPGHTWEEAPLLTLKQKQEWICLETLTPDTQYEFQVRVKPLQGEFTTWSPWSQPLAFRTKPAALGKD

SEQ ID NO: 423 - protein, 376 aa, Artificial Sequence
  Polypeptide chain
DKTHTCPPCPAPELLGGPSVFLFPPKPKDTLMISRTPEVTCVVVDVSHEDPEVKFNWYVDGVEVHNAKTKPREEQYNSTYRVVSVLTVLHQDWLNGKEYKCKVSNKALPAPIEKTISKAKGQPREPQVYTLPPCRDELTKNQVSLWCLVKGFYPSDIAVEWESNGQPENNYKTTPPVLDSDGSFFLYSKLTVDKSRWQQGNVFSCSVMHEALHNHYTQKSLSLSPGGGSSPPGGGSSGGGSGPAPTSSSTKKTQLQLEHLLLDLQMILNGINNYKNPKLTAMLTAKFAMPKKATELKHLQCLEEALKPLEEVLNLAQSKNFHLRPRDLISNINVIVLELKGSETTFMCEYADETATIVEFLNRWITFAQSIISTLT

SEQ ID NO: 424 - protein, 372 aa, Artificial Sequence
  Polypeptide chain
DKTHTCPPCPAPELLGGPSVFLFPPKPKDTLMISRTPEVTCVVVDVSHEDPEVKFNWYVDGVEVHNAKTKPREEQYNSTYRVVSVLTVLHQDWLNGKEYKCKVSNKALPAPIEKTISKAKGQPREPQVYTLPPCRDELTKNQVSLWCLVKGFYPSDIAVEWESNGQPENNYKTTPPVLDSDGSFFLYSKLTVDKSRWQQGNVFSCSVMHEALHNHYTQKSLSLSPGGSPGVPLSLYSGPAPTSSSTKKTQLQLEHLLLDLQMILNGINNYKNPKLTAMLTAKFAMPKKATELKHLQCLEEALKPLEEVLNLAQSKNFHLRPRDLISNINVIVLELKGSETTFMCEYADETATIVEFLNRWITFAQSIISTLT

SEQ ID NO: 425 - protein, 459 aa, Artificial Sequence
  Polypeptide chain
DKTHTCPPCPAPELLGGPSVFLFPPKPKDTLMISRTPEVTCVVVDVSHEDPEVKFNWYVDGVEVHNAKTKPREEQYNSTYRVVSVLTVLHQDWLNGKEYKCKVSNKALPAPIEKTISKAKGQPREPQVCTLPPSRDELTKNQVSLSCAVKGFYPSDIAVEWESNGQPENNYKTTPPVLDSDGSFFLVSKLTVDKSRWQQGNVFSCSVMHEALHNHYTQKSLSLSPGGPPSGSSPGVPLSLYGSGGGAVNGTSQFTCFYNSRANISCVWSQDGALQDTSCQVHAWPDRRRWNQTCELLPVSQASWACNLILGAPDSQKLTTVDIVTLRVLCREGVRWRVMAIQDFKPFENLRLMAPISLQVVHVETHRCNISWEISQASHYFERHLEFEARTLSPGHTWEEAPLLTLKQKQEWICLETLTPDTQYEFQVRVKPLQGEFTTWSPWSQPLAFRTKPAALGKD

SEQ ID NO: 426 - protein, 376 aa, Artificial Sequence
  Polypeptide chain
DKTHTCPPCPAPELLGGPSVFLFPPKPKDTLMIARTPEVTCVVVDVSHEDPEVKFNWYVDGVEVHNAKTKPREEQYASTYRVVSVLTVLHQDWLNGKEYKCKVSNKALPAPIEKTISKAKGQPREPQVYTLPPCRDELTKNQVSLWCLVKGFYPSDIAVEWESNGQPENNYKTTPPVLDSDGSFFLYSKLTVDKSRWQQGNVFSCSVMHEALHNHYTQKSLSLSPGGGSSPPGGGSSGGGSGPAPTSSSTKKTQLQLEHLLLDLQMILNGINNYKNPKLTAMLTAKFAMPKKATELKHLQCLEEALKPLEEVLNLAQSKNFHLRPRDLISNINVIVLELKGSETTFMCEYADETATIVEFLNRWITFAQSIISTLT

SEQ ID NO: 427 - protein, 372 aa, Artificial Sequence
  Polypeptide chain
DKTHTCPPCPAPELLGGPSVFLFPPKPKDTLMIARTPEVTCVVVDVSHEDPEVKFNWYVDGVEVHNAKTKPREEQYASTYRVVSVLTVLHQDWLNGKEYKCKVSNKALPAPIEKTISKAKGQPREPQVYTLPPCRDELTKNQVSLWCLVKGFYPSDIAVEWESNGQPENNYKTTPPVLDSDGSFFLYSKLTVDKSRWQQGNVFSCSVMHEALHNHYTQKSLSLSPGGSPGVPLSLYSGPAPTSSSTKKTQLQLEHLLLDLQMILNGINNYKNPKLTAMLTAKFAMPKKATELKHLQCLEEALKPLEEVLNLAQSKNFHLRPRDLISNINVIVLELKGSETTFMCEYADETATIVEFLNRWITFAQSIISTLT

SEQ ID NO: 428 - protein, 375 aa, Artificial Sequence; identical to SEQ ID NO: 258
  Polypeptide chain

SEQ ID NO: 429 - protein, 376 aa, Artificial Sequence; identical to SEQ ID NO: 259
  Polypeptide chain

SEQ ID NO: 430 - protein, 377 aa, Artificial Sequence; identical to SEQ ID NO: 260
  Polypeptide chain

SEQ ID NO: 431 - protein, 6 aa, Artificial Sequence
  Fc domain
LALAPG

SEQ ID NO: 432 - protein, 8 aa, Artificial Sequence
  Fc domain
AKTEPKSS

SEQ ID NO: 433 - protein, 4 aa, Artificial Sequence
  Fc domain
DAPG

SEQ ID NO: 434 - protein, 5 aa, Artificial Sequence
  Fc domain
EPKSS

1. A polypeptide drug construct comprising (i) a therapeutic moiety; (ii) a carrier moiety and (iii) a proteolytically cleavable peptide linker comprising a proteolytically cleavable peptide (CP) consisting of the amino acid sequence DLLAVVAAS or ISSGLLSGRS.

2. A polypeptide drug construct according to claim 1, wherein the proteolytically cleavable peptide (CP) is flanked on both sides by a spacer domain (SD1 and SD2) as shown in formula:
SD1-CP-SD2.

3.-5. (canceled)

6. A polypeptide drug construct according to claim 2, wherein the first spacer domain (SD1) and/or second spacer domain (SD2) is between 3 and 6 amino acids in length.

7.-15. (canceled)

16. A polypeptide drug construct according to claim 1, wherein the proteolytically cleavable peptide linker is covalently bonded directly to the therapeutic moiety.

17.-19. (canceled)

20. A polypeptide drug construct according to claim 1, wherein the polypeptide drug construct comprises more than one polypeptide chain.

21.-23. (canceled)

24. A polypeptide drug construct according to claim 1, further comprising a masking moiety.

25.-26. (canceled)

27. A polypeptide drug construct according to claim 1, wherein the polypeptide drug construct comprises a half-life extension moiety.

28.-31. (canceled)

32. A masked cytokine comprising:
a) a first polypeptide chain comprising a masking moiety linked to a first half-life extension moiety via a first linker; and
b) a second polypeptide chain comprising a cytokine moiety thereof linked to a second half-life extension moiety via a second linker,
wherein the first half-life extension moiety is associated with the second half-life extension moiety, and
wherein at least the first linker or the second linker is a proteolytically cleavable peptide linker comprising a proteolytically cleavable peptide (CP) consisting of the amino acid sequence DLLAVVAAS or ISSGLLSGRS.

33. A masked cytokine according to claim 32, wherein the first polypeptide chain comprises:
N′HL1-L1-MM C′
and the second polypeptide chain comprises:
N′HL2-L2-C C′
where HL1 is the first half life extension domain, L1 is the first linker, MM is the masking moiety, HL2 is the second half life extension domain, L2 is the second linker, and C is the cytokine moiety,
wherein the first half-life extension moiety is associated with the second half-life extension moiety, and
wherein at least the first linker or the second linker is a proteolytically cleavable peptide linker comprising a proteolytically cleavable peptide (CP) consisting of the amino acid sequence DLLAVVAAS or ISSGLLSGRS.

34.-35. (canceled)

36. A masked cytokine comprising a polypeptide chain comprising formula:
N′HL-L2-C-L1-MM C′
where HL is the half-life extension domain, L1 is the first linker, MM is the masking moiety, L2 is the second linker, and C is the cytokine moiety,
wherein at least the first linker comprises a proteolytically cleavable peptide linker comprising a proteolytically cleavable peptide (CP) consisting of the amino acid sequence DLLAVVAAS or ISSGLLSGRS.

37. A masked cytokine comprising a polypeptide chain comprising formula:
N′HL-L2-MM-L1-C C′
where HL is the half-life extension domain, L1 is the first linker, MM is the masking moiety, L2 is the second linker, and C is the cytokine moiety thereof,
wherein at least the first linker comprises a proteolytically cleavable peptide linker comprising a proteolytically cleavable peptide (CP) consisting of the amino acid sequence DLLAVVAAS or ISSGLLSGRS.

38. A masked cytokine according to claim 32, wherein the proteolytically cleavable peptide (CP) is flanked on both sides by a spacer domain (SD1 and SD2) as shown in formula:
SD1-CP-SD2.

39.-51. (canceled)

52. A masked cytokine according to claim 36, wherein the second linker is a cleavable or non-cleavable linker.

53.-56. (canceled)

57. A masked cytokine according to claim 36, wherein the half-life extension domain comprises a first half life extension domain and a second half life extension domain.

58.-69. (canceled)

70. A masked cytokine according to claim 32, wherein the cytokine moiety is an IL-2 cytokine moiety.

71.-83. (canceled)

84. A masked cytokine according to claim 32, wherein the cytokine moiety is an IL-12 cytokine moiety.

85.-115. (canceled)

116. A masked cytokine according to claim 32, wherein the cytokine moiety is an IL-15 cytokine moiety.

117.-154. (canceled)

155. A cleavage product comprising an active therapeutic moiety, preparable by proteolytic cleavage of the proteolytically cleavable linker in a polypeptide drug construct according to claim 1.

156.-162. (canceled)

163. A host cell comprising a nucleic acid encoding a masked cytokine of claim 32.

164.-182. (canceled)

183. A method of treating or preventing cancer in a subject, the method comprising administering to the subject an effective amount of a polypeptide drug construct according to claim 1.

184.-203. (canceled)
